(19) United States
(12) Patent Application Publication
(10) Pub. No.: US 2021/0324082 A1
(43) Pub. Date: Oct. 21, 2021

(54) PD-L1 TARGETING MOLECULES COMPRISING SHIGA TOXIN A SUBUNIT SCAFFOLDS

(71) Applicant: Molecular Templates, Inc., Austin, TX (US)

(72) Inventors: Eric Poma, New York, NY (US); Hilario Ramos, Austin, TX (US); Erin Willert, Round Rock, TX (US)

(21) Appl. No.: 17/204,486

(22) Filed: Mar. 17, 2021

Related U.S. Application Data
(60) Provisional application No. 63/010,671, filed on Apr. 15, 2020.

(51) Int. Cl. C07K 16/28; C07K 14/25

(52) U.S. Cl. CPC C07K 16/2827; C07K 14/25; C07K 2317/33; C07K 2317/565; C07K 2319/30

(57) ABSTRACT

Provided herein are PD-L1 binding molecules comprising Shiga toxin A Subunit derived polypeptides and methods of using the same. Certain PD-L1 targeting molecules embodiments are cytotoxic. Certain PD-L1 targeting molecules embodiments exhibit reduced immunogenic potential in mammals and/or are capable of delivering an immunogenic epitope to an MHC class I molecule of a PD-L1 positive cell. Certain PD-L1 targeting molecules embodiments are well-tolerated by mammals while retaining one or more of the features mentioned above. The PD-L1 targeting molecules have uses for selectively killing specific cells (e.g., PD-L1 positive tumor and/or immune cells); for selectively delivering cargos to specific cells (e.g., PD-L1 positive tumor and/or immune cells), and as therapeutic and/or diagnostic molecules for treating and diagnosing a variety of conditions, including cancers and tumors involving PD-L1 expressing cells.

### CROSS-REFERENCE TO RELATED APPLICATIONS

[0001] This application claims priority to U.S. Provisional Application No. 63/010,671, filed Apr. 15, 2020, the contents of which are incorporated by reference herein in their entirety.

### SEQUENCE LISTING

[0002] This application contains a Sequence Listing which has been submitted electronically and is hereby incorporated by reference in its entirety. The Sequence Listing was recorded Mar. 16, 2021, is named MTEM_030_01US_SeqList_ST25.txt, and is about 653 kilobytes in size.

### TECHNICAL FIELD

[0003] The present application relates to PD-L1 targeing molecules comprising Shiga toxin effector polypeptides, derived from the A Subunits of naturally occurring Shiga toxins. In some embodiments, the PD-L1 targeing molecules comprise Shiga toxin effector polypeptides that comprise a combination of mutations providing (1) de-immunization, (2) a reduction in protease sensitivity, and/or (3) an embedded, T-cell epitope(s); wherein the Shiga toxin effector polypeptides retain one or more Shiga toxin functions, such as, e.g., potent cytotoxicity. In some embodiments, the Shiga toxin effector polypeptides (1) exhibit reduced immunogenic potential in mammals and/or (2) are capable of delivering a CD8+ T-cell epitope to the MHC class I system of a PD-L1 expressing cell. The PD-L1 targeting molecules are useful for administration to multicellular organisms in order to kill PD-L1 expressing cells, such as, e.g., in situations when it is desirable to (1) eliminate or reduce non-specific toxicities, (2) eliminate or reduce certain immune responses, and/or (3) target a beneficial immune response(s) to a specific epitope delivered to a specific cell-type, such as, e.g., to recruit and activate CD8+ T-cells to a cell and/or tissue locus. The PD-L1 targeting molecules are useful (1) for selectively killing specific PD-L1 positive cell type(s) amongst other cells and (2) as therapeutic molecules for treating a variety of diseases, disorders, and conditions involving PD-L1 expressing cells, including cancers and tumors.

### BACKGROUND

[0004] The following includes information that may be useful in understanding the invention(s) described herein. It is not an admission that any of the information provided herein is prior art or relevant to the presently described or claimed invention(s), or that any publication or document that is specifically or implicitly referenced herein is prior art.

[0005] PD-L1, programmed cell death ligand 1 (also known as CD274), is expressed on the cell surface of tumors from a variety of malignancies and can bind to PD-1 on T-cells, leading to immune evasion of the tumor. Blockade of the PD-L1/PD-1 axis by therapeutic monoclonal antibodies has clinical efficacy. Novel binding domains targeting human PD-L1 are of interest in developing PD-L1 targeted agents for therapeutic or diagnostic purposes. Oncology indications include but are not limited to lung cancer, melanoma, bladder cancer, Hogkin's lymphoma, breast cancer (including triple negative for HER2, estrogen receptor, and progesterone receptor) as well as other malignancies with PD-L1 expression. PD-L1 is also expressed on the surface of some immune cells and could be a target for delivery of vaccines or other immunomodulatory agents to a subset of immune cells.

[0006] There is an urgent need for new therapeutics to supplement present day therapies for PD-L1 bearing neoplasms. Thus, it would be desirable to have cytotoxic PD-L1 targeting molecules which target PD-L1 for use as therapeutic molecules to treat a variety of diseases, such as, e.g., cancers and tumors, that can be treated by selective killing of a PD-L1 positive cell, or selective delivery of a beneficial agent thereto. In particular, it would be desirable to have PD-L1-binding, cytotoxic, PD-L1 targeting molecules exhibiting low antigenicity and/or immunogenicity, low off-target toxicity, and potent cytotoxicity. Furthermore, it would be desirable to have PD-L1 targeting therapeutic and/or diagnostic molecules exhibiting low antigenicity and/or immunogenicity, low off-target toxicity, high stability, and/or the ability to deliver peptide-epitope cargos for presentation by the MHC class I system of a target cell. For example, it would be desirable to have PD-L1 targeting molecules comprising Shiga toxin A Subunit derived components that maintain potent cytotoxicity while 1) reducing the potential for unwanted antigenicities and/or immunogenicities, 2) reducing the potential for non-specific toxicities, and/or 3) having the ability to deliver peptide-epitope cargos for presentation by the MHC class I system of a target cell, and which also exhibit potent Shiga toxin A Subunit-based cytotoxicity to target cells.

### BRIEF SUMMARY

[0007] Provided herein are various embodiments of PD-L1 targeting molecules, and compositions thereof, wherein each PD-L1 targeting molecule comprises (1) at least one Shiga toxin A Subunit effector polypeptide derived from the A Subunit of at least one member of the Shiga toxin family and (2) at least one PD-L1 binding region capable of specifically binding an extracellular part of a PD-L1 molecule. For each PD-L1 targeting molecule, the at least one binding region is heterologous to the Shiga toxin A Subunit effector polypeptide, such as, e.g., an immunoglobulin-type binding region.

[0008] The direct targeting of PD-L1 expressing immune cells may represent a treatment modality that is quite different compared to approved immune checkpoint inhibitors that reinvigorate antitumor immune responses by sterically blocking inhibitory signaling pathways. However, immune checkpoint inhibitors are not always effective, and checkpoint inhibitor therapy has been associated with severe side effects in patients, especially in combination. Thus, there is a need in the art for cancer therapies that are more effective, deplete immunosuppressive immune cells, and have less side effects compared to approved checkpoint inhibitors.

[0009] In some embodiments, the PD-L1 binding region comprises a heavy chain variable region (HVR-H) comprising three CDRs, each having at least 85%, 90%, 91%, 92%, 93%, 94%, 95%, 96%, 97%, 98%, or 99% identity to SEQ ID NO:22, SEQ ID NO:23, SEQ ID NO:24, SEQ ID NO:36, or SEQ ID NO:37; or consisting essentially of an amino acid sequence show in any one of SEQ ID NO:22, SEQ ID NO:23, SEQ ID NO:24, SEQ ID NO:36, and SEQ ID NO:37. In some embodiments, the binding region further comprises: (a) a light chain variable region (HVR-L) comprising three CDRs, having at least 85%, 90%, 91%, 92%, 93%, 94%, 95%, 96%, 97%, 98%, or 99% identity to SEQ ID NO:19, SEQ ID NO:20, and SEQ ID NO:21; or consisting essentially of an amino acid sequence shown in any one of SEQ ID NO:19, SEQ ID NO:20, and SEQ ID NO:21. In some embodiments, the binding region comprises: (a) a light chain variable region (HVR-L) comprising three CDRs, each comprising or consisting essentially of an amino acid sequence shown in any one of SEQ ID NO:19, SEQ ID NO:20, and SEQ ID NO:21; and (b) a heavy chain variable region (HVR-H) comprising three CDRs, each comprising or consisting essentially of an amino acid sequence shown in any one of SEQ ID NO:22, SEQ ID NO:23, SEQ ID NO:24, SEQ ID NO:36, and SEQ ID NO:37.

[0010] In some embodiments, the binding region comprises: (a) a light chain region having at least 85%, 90%, 91%, 92%, 93%, 94%, 95%, 96%, 97%, 98%, or 99%, identity to SEQ ID NO:25 or SEQ ID NO:27 or consisting essentially of the amino acid sequence of SEQ ID NO:25 or SEQ ID NO:27; and/or (b) a heavy chain region having at least 85%, 90%, 91%, 92%, 93%, 94%, 95%, 96%, 97%, 98%, or 99% identity to SEQ ID NO:26 or consisting essentially of the amino acid sequence of SEQ ID NO:26. In some embodiments, the binding region comprises a polypeptide having at least 85%, 90%, 91%, 92%, 93%, 94%, 95%, 96%, 97%, 98%, or 99% identity to any one of SEQ ID NOs: 28-35 and 38-40 or consists essentially of the polypeptide shown in any one of SEQ ID NOs: 28-35 and 38-40. In some embodiments, the binding region is a single-chain variable fragment, such as, e.g., consisting of, comprising, or consisting essentially of the polypeptide of any one of SEQ ID NOs: 28-35 and 38-40.

[0011] In some embodiments, a PD-L1 binding molecule comprises: A) a Shiga toxin A subunit effector polypeptide; and B) a binding region capable of specifically binding an extracellular part of PD-L1, wherein the binding region comprises (a) a light chain variable region comprising: (i) a CDR1 comprising the amino acid sequence TGTSSDVGSYNRVS (SEQ ID NO:19), (ii) a CDR2 comprising the amino acid sequence EVSNRPS (SEQ ID NO:20), and (iii) a CDR3 comprising the amino acid sequence SSHTTSGTYV (SEQ ID NO:21); and (b) a heavy chain variable region comprising: (i) a CDR1 comprising the amino acid sequence SYAIS (SEQ ID NO:22), (ii) a CDR2 comprising the amino acid sequence GIIPIFGTANYAQKFQG (SEQ ID NO:23), and (iii) a CDR3 comprising the amino acid sequence DQGYAHAFDI (SEQ ID NO:24).

[0012] In some embodiments, a method of killing a PD-L1 expressing cell comprises the step of contacting the cell with a PD-L1 binding molecule or a pharmaceutical composition comprising the same. In some embodiments, administration of the PD-L1 targeting molecule to a PD-L1 expressing cell results in (i) the internalization of the PD-L1 targeting molecule by the cell and (ii) the death of the cell. In some embodiments, administration of the PD-L1 targeting molecule to a PD-L1 expressing cell results in (i) the internalization of the PD-L1 targeting molecule by the cell and (ii) the death of the cell due to a catalytically active Shiga toxin A subunit effector polypeptide. In some embodiments, administration of the PD-L1 targeting molecule to a PD-L1 expressing cell results in (i) the internalization of the PD-L1 targeting molecule by the cell and (ii) the death of the cell due to delivery and presentation of T-cell epitope cargo. In some embodiments, administration of the PD-L1 targeting molecule to a PD-L1 expressing cell results in (i) the internalization of the PD-L1 targeting molecule by the cell and (ii) the cell presenting on a cellular surface a heterologous, CD8+ T-cell epitope-peptide cargo delivered by the PD-L1 targeting molecule complexed with a MHC class I molecule. In some embodiments, the PD-L1 targeting molecules are capable, when introduced into to cells, of exhibiting a cytotoxicity with a half-maximal inhibitory concentration (CD₅₀) value of 300 nM or less and/or capable of exhibiting a significant level of Shiga toxin cytotoxicity. In some embodiments, the Shiga toxin A Subunit effector polypeptide is capable of exhibiting a ribosome inhibition activity with a half-maximal inhibitory concentration (IC₅₀) value of less than 10,000, 5,000, 1,000, 500, or 200 picomolar.

[0013] In some embodiments, the at least one Shiga toxin A Subunit derived polypeptide comprises a combination of features (e.g., de-immunized sub-region(s), heterologous epitope comprising sub-region(s), a protease-cleavage resistant sub-region, and/or a carboxy-terminal, endoplasmic reticulum retention/retrieval signal motif). In some embodiments, the PD-L1 targeting molecules provide a combination of several properties in a single molecule, such as, e.g., efficient cellular internalization, potent cell-targeted cytotoxicity, selective cytotoxicity, de-immunization, low non-specific toxicity at high dosages, high stability, CD8+ T-cell hyper-immunization, and/or the ability to deliver a heterologous, T-cell epitope(s) to the MHC I class pathway of a target cell.

[0014] In some embodiments, the PD-L1 targeting molecules are useful for administration to chordates, such as, e.g., when it is desirable to (1) reduce or eliminate a certain immune response(s) resulting from the administered molecule, (2) reduce or eliminate non-specific toxicities resulting from the administered molecule, (3) specifically kill a PD-L1 expressing target cell(s) in vivo, and/or (4) target a beneficial immune response(s) to a target cell-type, a tumor mass comprising a target cell-type, and/or a tissue locus comprising such a target cell-type, such as via stimulating intercellular engagement of a CD8+ T-cell(s) of the chordate with a specific MHC class I-eptiope complex displaying target cell-type.

[0015] In some embodiments, a method of treating a disease, disorder, or condition involving a PD-L1 expressing cell type comprises the step administering to a patient in need thereof an effective amount of a PD-L1 binding molecule or a pharmaceutical composition comprising the same. The disease, disorder, or condition may be selected from, for example, cancer, tumor, immune disorder, and microbial infection. In some embodiments, the cancer is selected from: bone cancer, breast cancer, central/peripheral nervous system cancer, gastrointestinal cancer, germ cell cancer, glandular cancer, head-neck cancer, hematological cancer, kidney-urinary tract cancer, liver cancer, lung/pleura cancer, prostate cancer, sarcoma, skin cancer, and uterine cancer. In some embodiments, the immune disorder is associated with a disease selected from: amyloidosis, ankylosing spondylitis, asthma, Crohn's disease, diabetes, graft rejection, graft versus host disease, Hashimoto's thyroiditis, hemolytic uremic syndrome, HIV-related disease, lupus erythmatosus, multiple sclerosis, polyarteritis, psoriasis, psoriatic arthritis, rheumatoid arthritis, scleroderma, septic shock, Sjögren's syndrome, ulcerative colitis, and vasculitis.

[0016] In some embodiments, a method for purifying the PD-L1 binding molecule from a cellular lysate comprising the PD-L1 binding molecule comprises (i) contacting the cellular lysate with a bacterial protein L to create a protein L-PD-L1 binding molecule complex, and (ii) separating the protein L-PD-L1 binding molecule complex from the cellular lysate.

[0017] These and other features, aspects and advantages will become better understood with regard to the following description, appended claims, and accompanying figures. The aforementioned elements may be individually combined or removed freely in order to make other embodiments of the invention, without any statement to object to such combination or removal hereinafter.

### BRIEF DESCRIPTION OF THE DRAWINGS

[0018] FIG. 1A-1D provide schematic drawings of illustrative PD-L1 targeting molecules. These exemplary PD-L1 binding molecules comprise one or more toxins or toxin subunits, such as Shiga toxin A Subunit effector polypeptides, and one or more PD-L1 binding regions (FIG. 1A, 1B). In some exemplary PD-L1 binding molecules, the PD-L1 binding region is a scFv, and the scFv is shown participating in intermolecular variable domain exchange with a neighboring scFv (FIG. 1B, bottom left). In some embodiments, the PD-L1 binding molecules comprise a heterologous CD8+ T-cell epitope, which may be located, for example, at the N-terminus or C-terminus of the molecule (FIG. 1C, 1B).

[0019] FIG. 2 is a graph showing binding of illustrative PD-L1 targeting molecules to PD-L1 expressing target cells, as measured by flow cytometry.

[0020] FIG. 3 is a graph showing cytotoxicity of illustrative PD-L1 targeting molecules to PD-L1 expressing cells.

[0021] FIG. 4 is a graph showing interferon-gamma (IFN-γ) secretion induced by illustrative PD-L1 targeting molecules in donor cytotoxic T lymphocytes (CTL) and tumor cell co-cultures.

[0022] FIG. 5 is a graph showing PD-1/PD-L1 intercellular signaling effects induced by an anti-PD-L1 monoclonal antibody (mAb), a PD-L1 targeting molecule (DI-SLTA-1-non target), a molecule comprising a Shiga toxin A subsunit effector and a binding domain that does not bind to PD-L1 (DI-SLTA-1-nontarget), and 115695. The assay was performed in a cell line that expresses a luciferase (LUC) reporter driven by a Nuclear Factor of Activated T cells (NFAT) response element. Luciferase expression was detected by measuring relative light units (RLU).

[0023] FIG. 6 is a graph showing dose-dependent killing of target cells in the presence of donor cytotoxic T lymphocytes (CTLs).

[0024] FIG. 7 is a graph showing cytotoxicity of illustrative PD-L1 targeting molecules to PD-L1 positive/HLA:A02 positive cells in the presence of donor cytotoxic T lymphocytes (CTLs). “Ina” refers to catalytically inactivated DI-SLTA subunits.

[0025] FIG. 8 is a graph demonstrating that ER-DI-SLTA-1 constructs (“ER” indicating that the constructs comprise an endoplasmic reticulum retention signal) display less cytotoxicity compared to their DI-SLTA-1 counterparts.

[0026] FIG. 9 is a graph demonstrating that ER-DI-SLTA-1 constructs display cytotoxicity to PD-L1 positive/HLA:A02 positive cells in the presence of donor cytotoxic T lymphocytes.

[0027] FIG. 10 is a graph showing interferon-gamma (IFN-γ) secretion induced by illustrative PD-L1 targeting molecules in donor CTL and tumor cell co-cultures.

[0028] FIG. 11A is a schematic that shows the protocol for a cytotoxicity assay in the presence of CMV-antigen specific cytotoxic T lymphocytes (CTLs), after 4-hour acute exposure and 24-hour sustained exposure.

[0029] FIG. 11B shows cytotoxicity of illustrative PD-L1 targeting molecules to PD-L1 positive/HLA:A02 positive cells in the presence of cytotoxic T lymphocytes after acute or sustained exposure. “C1” referes to a polypeptide comprising only the CD8+ T-cell epitope.

[0030] FIG. 12 shows cytotoxicity of illustrative PD-L1 targeting molecules to PD-L1 positive/HLA:A02 positive cells in the presence of cytotoxic T lymphocytes, after acute (4 hour) or sustained (24 hour) exposure.

[0031] FIG. 13A shows a membrane proteome array for molecule DI-SLTA-scFva::C1::C1, also referred to herein as 115765 (SEQ ID NO: 87). The second dot (on the X-axis, near 4000) corresponds to BACE2, which binds to poorly folded molecules.

[0032] FIG. 13B shows a membrane proteome array (no antigen control) for molecule DI-SLTA-1::scFva (SEQ ID NO: 86), also referred to herein as 115695.

[0033] FIG. 14 provides graphs showing that treatment with a PD-L1 targeting molecule induces cytokine secretion by CTLs, which is specific and correlated with both MEW allele expression and PD-L1 expression. Surface expression of HLA:A2 and PD-L1 was determined using flow cytometry.

[0034] FIG. 15 is a graph showing viability of MDA-MB231 cells over time, after treatment with various PD-L1 targeting molecules (right panel). FIG. 15 also shows interferon-gamma (IFN-γ) secretion as determined by ELISA, after treatment with various PD-L1 targeting molecules. FIG. 15 demonstrates that two cytotoxic mechanisms (inhibition of ribosomes (MOA-1) and delivery of a CD8+ T-cell epitope (MOA-2)) function together, resulting in greater target cell cytotoxicity.

[0035] FIG. 16 is a graph showing cytotoxicity in MDA-Mb231 cells resulting from acute or sustained PD-L1 targeting molecule exposure in the presence of antigen-specific CTLs.

[0036] FIG. 17 shows cytokine secretion (interferon gamma, IFN-γ) resulting from acute or sustained PD-L1 targeting molecule exposure in the presence of antigen-specific CTLs.

[0037] FIG. 18 is a schematic showing two mechanisms of action available in a single PD-L1 targeting scaffold. First, ribosomal inactivation requires cytosolic localization and a catalytically active Shiga toxin A Subunit effector polypeptide component. Second, CD8+ T-cell epitope delivery to the MEW class I presentation pathway within the target cell. In some embodiments, it is possible to deliver a CD8+ T-cell epitope without having a sigfnciant impact on ribosomal inactivation.

[0038] FIG. 19 is a schematic futher illustrating that there are two mechanisms of action (MOA) available in a single scaffold. Ribosomal inactivation requires cytosolic localization and catalytically active Shiga toxin A Subunit effector polypeptide (MOA1). Second, CD8+ T-cell epitope delivery to the MHC class I presentation pathway within the target cell is possible (MOA2), and this second mechanism of action does not interfere with the first. For example, CD8+ T-cell epitope delivery to the MEW class I presentation pathway possible without the first mechanism of action, using Shiga toxin A Subunit effector polypeptide inactivated scaffolds, such as catalytically inactive forms and/or carboxy-terminus truncations resulting in ER retention.

[0039] FIG. 20 is a chart showing choice of antigen and relative advantages thereof, in connection with antigen seeding technology (AST).

[0040] FIG. 21 shows functional profiles for illustrative PD-L1 targeting molecules. Atezolizumab is a fully humanized, engineered monoclonal antibody (IgG1) that binds to PD-L1. Underlined values represent results consistent with a favorable AST profile.

[0041] FIG. 22 is a summary of the functional profile for DI-SLTA-1::scFva::C1::C1 (115765, SEQ ID NO: 87).

[0042] FIG. 23 provides graphs showing cytotoxicity of various illustrative PD-L1 targeting molecules on HCC 1954 (left panel) and MDA-MB-231 (right panel) cells. Molecule 115765 corresponds to SEQ ID NO: 87.

[0043] FIG. 24 is a chart showing immune effects and pharmacodynamic response after dosing with either 115765 (SEQ ID NO: 87) or 115695 (SEQ ID NO: 86). irAE stands for immune-related adverse events.

[0044] FIGS. 25A and 25B shows comparative in vitro data for different PD-L1 binding molecules (115749, 115765 (SEQ ID NO: 87), and 115695 (SEQ ID NO: 86)). This data is from an assay testing antigen seeding in MDA-MB-231 cells after incubation with a PD-L1 binding molecule for 4 hours or 24 hours.

[0045] FIGS. 26A and 26B show the results of an experiment wherein monocytes (IC) isolated from donor patients were treated with 20 μg/mL of various PD-L1 binding molecules (FIG. 26A), and tumor cells (HCC1954) were treated with 2 μg/mL of the PD-L1 targeting molecules (FIG. 25B). Cell kill was measured using a standard Cell Titer Glo assay. Molecule 115765 corresponds to SEQ ID NO: 87 and 115695 corresponds to SEQ ID NO: 86. “DI-SLTA” refers to the Shiga toxin A subunit alone (i.e., without a PD-L1 binding domain).

### DETAILED DESCRIPTION

[0046] The present invention is described more fully hereinafter using illustrative, non-limiting embodiments, and references to the accompanying figures. This invention may, however, be embodied in many different forms and should not be construed as to be limited to the embodiments set forth below. Rather, these embodiments are provided so that this disclosure is thorough and conveys the scope of the invention to those skilled in the art.

[0047] In order that the present invention may be more readily understood, certain terms are defined below. Additional definitions may be found within the detailed description of the invention.

[0048] As used in the specification and the appended claims, the terms “a,” “an” and “the” include both singular and the plural referents unless the context clearly dictates otherwise.

[0049] As used in the specification and the appended claims, the term “and/or” when referring to two species, A and B, means at least one of A and B. As used in the specification and the appended claims, the term “and/or” when referring to greater than two species, such as A, B, and C, means at least one of A, B, or C, or at least one of any combination of A, B, or C (with each species in singular or multiple possibility).

[0050] Throughout this specification, the word “comprise” or variations such as “comprises” or “comprising” will be understood to imply the inclusion of a stated integer (or components) or group of integers (or components), but not the exclusion of any other integer (or components) or group of integers (or components).

[0051] Throughout this specification, the term “including” is used to mean “including but not limited to.” “Including” and “including but not limited to” are used interchangeably.

[0052] The term “amino acid residue” or “amino acid” includes reference to an amino acid that is incorporated into a protein, polypeptide, or peptide. The term “polypeptide” includes any polymer of amino acids or amino acid residues. The term “polypeptide sequence” refers to a series of amino acids or amino acid residues which physically comprise a polypeptide. A “protein” is a macromolecule comprising one or more polypeptides or polypeptide “chains.” A “peptide” is a small polypeptide of sizes less than about a total of 15 to 20 amino acid residues. The term “amino acid sequence” refers to a series of amino acids or amino acid residues which physically comprise a peptide or polypeptide depending on the length. Unless otherwise indicated, polypeptide and protein sequences disclosed herein are written from left to right representing their order from an amino-terminus to a carboxy-terminus.

[0053] The terms “amino acid,” “amino acid residue,” “amino acid sequence,” or polypeptide sequence include naturally occurring amino acids (including L and D isosteriomers) and, unless otherwise limited, also include known analogs of natural amino acids that can function in a similar manner as naturally occurring amino acids, such as selenocysteine, pyrrolysine, N-formylmethionine, gamma-carboxyglutamate, hydroxyprolinehypusine, pyroglutamic acid, and selenomethionine. The amino acids referred to herein are described by shorthand designations as follows in Table 1:

TABLE 1
Amino Acid Nomenclature

| Name | 3-letter | 1-letter |
|---|---|---|
| Alanine | Ala | A |
| Arginine | Arg | R |
| Asparagine | Asn | N |
| Aspartic Acid or Aspartate | Asp | D |
| Cysteine | Cys | C |
| Glutamic Acid or Glutamate | Glu | E |
| Glutamine | Gln | Q |
| Glycine | Gly | G |
| Histidine | His | H |
| Isoleucine | Ile | I |
| Leucine | Leu | L |
| Lysine | Lys | K |
| Methionine | Met | M |
| Phenylalanine | Phe | F |
| Proline | Pro | P |
| Serine | Ser | S |
| Threonine | Thr | T |
| Tryptophan | Trp | W |
| Tyrosine | Tyr | Y |
| Valine | Val | V |

[0054] The phrase “conservative substitution” with regard to an amino acid residue of a peptide, peptide region, polypeptide region, protein, or molecule refers to a change in the amino acid composition of the peptide, peptide region, polypeptide region, protein, or molecule that does not substantially alter the function and structure of the overall peptide, peptide region, polypeptide region, protein, or molecule (see Creighton, Proteins: Structures and Molecular Properties (W. H. Freeman and Company, New York (2nd ed., 1992))).

[0055] As used herein, the phrase “derived from” when referring to a polypeptide or polypeptide region means that the polypeptide or polypeptide region comprises amino acid sequences originally found in a “parental” protein and which may now comprise certain amino acid residue additions, deletions, truncations, rearrangements, or other alterations relative to the original polypeptide or polypeptide region as long as a certain function(s) and/or a structure(s) of the “parental” molecule are substantially conserved. The skilled worker will be able to identify a parental molecule from which a polypeptide or polypeptide region was derived using techniques known in the art, e.g., protein sequence alignment software.

[0056] As used herein and with regard to a Shiga toxin polypeptide sequence or Shiga toxin derived polypeptide, the term “wild-type” generally refers to a naturally occurring, Shiga toxin protein sequence(s) found in a living species, such as, e.g., a pathogenic bacterium, wherein that Shiga toxin protein sequence(s) is one of the most frequently occurring variants. This is in contrast to infrequently occurring Shiga toxin protein sequences that, while still naturally occurring, are found in less than one percent of individual organisms of a given species when sampling a statistically powerful number of naturally occurring individual organisms of that species which comprise at least one Shiga toxin protein variant. A clonal expansion of a natural isolate outside its natural environment (regardless of whether the isolate is an organism or molecule comprising biological sequence information) does not alter the naturally occurring requirement as long as the clonal expansion does not introduce new sequence variety not present in naturally occurring populations of that species and/or does not change the relative proportions of sequence variants to each other.

[0057] The terms “associated,” “associating,” “linked,” or “linking” as used herein refer to the state of two or more components of a molecule being joined, attached, connected, or otherwise coupled to form a single molecule or the act of making two molecules associated with each other to form a single molecule by creating an association, linkage, attachment, and/or any other connection between the two molecules. For example, the term “linked” may refer to two or more components associated by one or more atomic interactions such that a single molecule is formed and wherein the atomic interactions may be covalent and/or non-covalent. Non-limiting examples of covalent associations between two components include peptide bonds and cysteine-cysteine disulfide bonds. Non-limiting examples of non-covalent associations between two molecular components include ionic bonds.

[0058] As used herein, the term “linked” refers to two or more molecular components associated by one or more atomic interactions such that a single molecule is formed and wherein the atomic interactions includes at least one covalent bond. As used herein, the term “linking” refers to the act of creating a linked molecule as described above.

[0059] As used herein, the term “fused” refers to two or more proteinaceous components associated by at least one covalent, peptide bond, regardless of whether the peptide bond involves the participation of a carbon atom of a carboxyl acid group or involves another carbon atom, such as, e.g., the α-carbon, β-carbon, γ-carbon, σ-carbon, etc. Non-limiting examples of two proteinaceous components fused together include, e.g., an amino acid, peptide, or polypeptide fused to a polypeptide via a peptide bond such that the resulting molecule is a single, continuous polypeptide. As used herein, the term “fusing” refers to the act of creating a fused molecule as described above, such as, e.g., a fusion protein generated from the recombinant fusion of genetic regions which when translated produces a single proteinaceous molecule.

[0060] The symbol “::” means the polypeptide regions before and after it are physically linked together to form a continuous polypeptide.

[0061] As used herein, the terms “expressed,” “expressing,” or “expresses,” and grammatical variants thereof, refer to translation of a polynucleotide or nucleic acid into a protein. The expressed protein may remain intracellular, become a component of the cell surface membrane or be secreted into an extracellular space.

[0062] As used herein, cells which express a significant amount of an extracellular target biomolecule at least one cellular surface are “target positive cells” or “target+ cells” and are cells physically coupled to the specified, extracellular target biomolecule.

[0063] As used herein, the symbol “α” is shorthand for an immunoglobulin-type binding region capable of binding to the biomolecule following the symbol. The symbol “α” is used to refer to the functional characteristic of an immunoglobulin-type binding region based on its ability to bind to the biomolecule following the symbol with a binding affinity described by a dissociation constant (K_{D}) of 10⁻⁵ or less.

[0064] As used herein, the term “heavy chain variable (V_{H}) domain” or “light chain variable (V_{L}) domain” respectively refer to any antibody V_{H} or V_{L} domain (e.g. a human V_{H} or V_{L} domain) as well as any derivative thereof retaining at least qualitative antigen binding ability of the corresponding native antibody (e.g. a humanized V_{H} or V_{L} domain derived from a native murine V_{H} or V_{L} domain). A V_{H} or V_{L} domain consists of a “framework” region interrupted by the three CDRs or ABRs. The framework regions serve to align the CDRs or ABRs for specific binding to an epitope of an antigen. From amino-terminus to carboxy-terminus, both V_{H} and V_{L} domains comprise the following framework (FR) and CDR regions or ABR regions: FR1, CDR1, FR2, CDR2, FR3, CDR3, and FR4; or, similarly, FR1, ABR1, FR2, ABR2, FR3, ABR3, and FR4. As used herein, the terms “HCDR1,” “HCDR2,” or “HCDR3” are used to refer to CDRs 1, 2, or 3, respectively, in a V_{H} domain, and the terms “LCDR1,” “LCDR2,” and “LCDR3” are used to refer to CDRs 1, 2, or 3, respectively, in a V_{L} domain. For camelid V_{H}H fragments, IgNARs of cartilaginous fish, V_{NAR} fragments, certain single domain antibodies, and derivatives thereof, there is a single, heavy chain variable domain comprising the same basic arrangement: FR1, CDR1, FR2, CDR2, FR3, CDR3, and FR4. As used herein, the terms “HCDR1,” “HCDR2,” or “HCDR3” may be used to refer to CDRs 1, 2, or 3, respectively, in a single heavy chain variable domain.

[0065] As used herein, the term “effector” means providing a biological activity, such as cytotoxicity, biological signaling, enzymatic catalysis, subcellular routing, and/or intermolecular binding resulting in an allosteric effect(s) and/or the recruitment of one or more factors.

[0066] The term “Shiga toxin” herein refers to two families of related toxins: Shiga toxin (Stx)/Shiga-like toxin 1 (SLT-1/Stx1) and Shiga-like toxin 2 (SLT-2/Stx2). Stx is produced by Shigella dysenteriae, while SLT-1 and SLT-2 are derived from Escherichia coli. Members of the Shiga toxin family share the same overall structure and mechanism of action (Engedal N et al., Microbial Biotech 4: 32-46 (2011)). For example, Stx, SLT-1 and SLT-2 display indistinguishable enzymatic activity in cell free systems (Head S et al., J Biol Chem 266: 3617-21 (1991); Tesh V et al., Infect Immun 61: 3392-402 (1993); Brigotti M et al., Toxicon 35:1431-1437 (1997)).

[0067] Stx, SLT-1, and SLT-2 are multimeric molecules comprised of two polypeptide subunits, A and B. The B Subunit is a pentamer that binds the toxin to glycolipids on host cell membranes and enters the cell via endocytosis. Once inside the cell, the A Subunit undergoes proteolytic cleavage and the reduction of an internal disulfide bond to generate the A1 Subunit and the A2 Subunit. The Shiga toxin or Shiga-like toxin A1 Subunits (e.g., SLT-1-A1) are N-glycosidases that catalytically inactivate the 28S ribosomal RNA subunit to inhibit protein synthesis.

[0068] As described herein, the phrase “Shiga toxin effector region” refers to a polypeptide derived from a Shiga toxin A Subunit or Shiga-like toxin A Subunit of the Shiga toxin family, which exhibits at least one Shiga toxin effector function. For example, SEQ ID NO: 49-61 are derived from StxA and/or SLT-1A. In some embodiments, the Shiga toxin effector region of the PD-L1-binding molecule is a Shiga toxin A Subunit, such as StxA. In some embodiments, the Shiga toxin effector region of the PD-L1-binding molecule is a Shiga-like toxin A Subunit, such as SLT-1A or SLT-2A. In some embodiments, the Shiga toxin effector region of the PD-L1-binding molecule is an A1 Subunit of SLT-1 (e.g., SLT-1-A1). In some embodiments, the Shiga toxin effector region of the PD-L1-binding molecule is an enzymatically active, de-immunized Shiga-like toxin A1 Subunit of SLT-1 (e.g., SLT-1-A1 V1). In some embodiments, the Shiga toxin effector region has a sequence of SEQ ID NO: 41, or a sequence at least 85%, at least 90%, at least 95%, or at least 99% identical thereto. In some embodiments, the Shiga toxin effector region has a sequence of SEQ ID NO: 41 with 1-10, 10-20, 20-30, 30-40, 40-50 or more amino acid substitutions. In some embodiments, the Shiga toxin effector region has a sequence of any one of SEQ ID NO: 259 or 261-284, or a sequence at least 85%, at least 90%, at least 95%, or at least 99% identical thereto. In some embodiments, the Shiga toxin effector region has a sequence of any one of SEQ ID NO: 259 or 264-284 with 1-10, 10-20, 20-30, 30-40, 40-50 or more amino acid substitutions.

[0069] As used herein, a Shiga toxin effector function is a biological activity conferred by a polypeptide region derived from a Shiga toxin A Subunit. Non-limiting examples of Shiga toxin effector functions include promoting cell entry; lipid membrane deformation; promoting cellular internalization; stimulating clathrin-mediated endocytosis; directing intracellular routing to various intracellular compartments such as, e.g., the Golgi, endoplasmic reticulum, and cytosol; directing intracellular routing with a cargo; inhibiting a ribosome function(s); catalytic activities, such as, e.g., N-glycosidase activity and catalytically inhibiting ribosomes; reducing protein synthesis, inducing caspase activity, activating effector caspases, effectuating cytostatic effects, and cytotoxicity. Shiga toxin catalytic activities include, for example, ribosome inactivation, protein synthesis inhibition, N-glycosidase activity, polynucleotide:adenosine glycosidase activity, RNAase activity, and DNAase activity. Shiga toxins are ribosome inactivating proteins (RIPs). RIPs can depurinate nucleic acids, polynucleosides, polynucleotides, rRNA, ssDNA, dsDNA, mRNA (and polyA), and viral nucleic acids (see e.g., Barbieri L et al., Biochem J 286: 1-4 (1992); Barbieri L et al., Nature 372: 624 (1994); Ling J et al., FEBS Lett 345: 143-6 (1994); Barbieri L et al., Biochem J 319: 507-13 (1996); Roncuzzi L, Gasperi-Campani A, FEBS Lett 392: 16-20 (1996); Stirpe F et al., FEBS Lett 382: 309-12 (1996); Barbieri L et al., Nucleic Acids Res 25: 518-22 (1997); Wang P, Turner N, Nucleic Acids Res 27: 1900-5 (1999); Barbieri L et al., Biochim Biophys Acta 1480: 258-66 (2000); Barbieri L et al., J Biochem 128: 883-9 (2000); Brigotti M et al., Toxicon 39: 341-8 (2001); Brigotti M et al., FASEB J 16: 365-72 (2002); Bagga S et al., J Biol Chem 278: 4813-20 (2003); Picard D et al., J Biol Chem 280: 20069-75 (2005)). Some RIPs show antiviral activity and superoxide dismutase activity (Erice A et al., Antimicrob Agents Chemother 37: 835-8 (1993); Au T et al., FEBS Lett 471: 169-72 (2000); Parikh B, Turner N, Mini Rev Med Chem 4: 523-43 (2004); Sharma N et al., Plant Physiol 134: 171-81 (2004)). Shiga toxin catalytic activities have been observed both in vitro and in vivo. Non-limiting examples of assays for Shiga toxin effector activity measure various activities, such as, e.g., protein synthesis inhibitory activity, depurination activity, inhibition of cell growth, cytotoxicity, supercoiled DNA relaxation activity, and nuclease activity.

[0070] As used herein, the retention of Shiga toxin effector function refers to being capable of exhibiting a level of Shiga toxin functional activity, as measured by an appropriate quantitative assay with reproducibility, comparable to a wild-type, Shiga toxin effector polypeptide control (e.g. a Shiga toxin A1 fragment) or PD-L1 targeting molecule comprising a wild-type Shiga toxin effector polypeptide (e.g. a Shiga toxin A1 fragment) under the same conditions. For the Shiga toxin effector function of ribosome inactivation or ribosome inhibition, retained Shiga toxin effector function is exhibiting an IC₅₀ of 10,000 pM or less in an in vitro setting, such as, e.g., by using an assay known to the skilled worker and/or described herein. For the Shiga toxin effector function of cytotoxicity in a target positive cell-kill assay, retained Shiga toxin effector function is exhibiting a CD₅₀ of 1,000 nM or less, depending on the cell type and its expression of the appropriate extracellular target biomolecule, as shown, e.g., by using an assay known to the skilled worker and/or described herein.

[0071] As used herein, the term “equivalent” with regard to ribosome inhibition means an empirically measured level of ribosome inhibitory activity, as measured by an appropriate quantitative assay with reproducibility, which is reproducibly within 10% or less of the activity of the reference molecule (e.g., the second PD-L1 targeting molecule or third PD-L1 targeting molecule) under the same conditions.

[0072] As used herein, the term “equivalent” with regard to cytotoxicity means an empirically measured level of cytotoxicity, as measured by an appropriate quantitative assay with reproducibility, which is reproducibly within 10% or less of the activity of the reference molecule (e.g., the second PD-L1 targeting molecule or third PD-L1 targeting molecule) under the same conditions.

[0073] As used herein, the term “attenuated” with regard to cytotoxicity means a molecule exhibits or exhibited a CD₅₀ between 10-fold to 100-fold of a CD₅₀ exhibited by a reference molecule under the same conditions.

[0074] Inaccurate IC₅₀ and CD₅₀ values should not be considered when determining a level of Shiga toxin effector function activity. For some samples, accurate values for either IC₅₀ or CD₅₀ might be unobtainable due to the inability to collect the required data points for an accurate curve fit. For example, theoretically, neither an IC₅₀ nor CD₅₀ can be determined if greater than 50% ribosome inhibition or cell death, respectively, does not occur in a concentration series for a given sample. Data insufficient to accurately fit a curve as described in the analysis of the data from Shiga toxin effector function assays, such as, e.g., assays described in the Examples below, should not be considered as representative of actual Shiga toxin effector function.

[0075] A failure to detect activity in Shiga toxin effector function may be due to improper expression, polypeptide folding, and/or protein stability rather than a lack of cell entry, subcellular routing, and/or enzymatic activity. Assays for Shiga toxin effector functions may not require much polypeptide to measure significant amounts of Shiga toxin effector function activity. To the extent that an underlying cause of low or no effector function is determined empirically to relate to protein expression or stability, one of skill in the art may be able to compensate for such factors using protein chemistry and molecular engineering techniques known in the art, such that a Shiga toxin functional effector activity may be restored and measured. As examples, improper cell-based expression may be compensated for by using different expression control sequences; and improper polypeptide folding and/or stability may benefit from stabilizing terminal sequences, or compensatory mutations in non-effector regions which stabilize the three-dimensional structure of the molecule.

[0076] Certain Shiga toxin effector functions are not easily measurable, e.g. subcellular routing functions. For example, there is no routine, quantitative assay to distinguish whether the failure of a Shiga toxin effector polypeptide to be cytotoxic and/or deliver a heterologous epitope is due to improper subcellular routing, but at a time when tests are available, then Shiga toxin effector polypeptides may be analyzed for any significant level of subcellular routing as compared to the appropriate wild-type Shiga toxin effector polypeptide. However, if a Shiga toxin effector polypeptide component of a PD-L1 targeting molecule exhibits cytotoxicity comparable or equivalent to a wild-type Shiga toxin A Subunit construct, then the subcellular routing activity level is inferred to be comparable or equivalent, respectively, to the subcellular routing activity level of a wild-type Shiga toxin A Subunit construct at least under the conditions tested.

[0077] When new assays for individual Shiga toxin functions become available, Shiga toxin effector polypeptides and/or PD-L1 targeting molecules comprising Shiga toxin effector polypeptides may be analyzed for any level of those Shiga toxin effector functions, such as being within 1000-fold or 100-fold or less the activity of a wild-type Shiga toxin effector polypeptide or exhibiting 3-fold to 30-fold or greater activity as compared to a functional knockout, Shiga toxin effector polypeptide.

[0078] Sufficient subcellular routing may be merely deduced by observing a molecule's cytotoxic activity levels in cytotoxicity assays, such as, e.g., cytotoxicity assays based on T-cell epitope presentation or based on a toxin effector function involving a cytosolic and/or endoplasmic reticulum-localized, target substrate.

[0079] As used herein, the retention of “significant” Shiga toxin effector function refers to a level of Shiga toxin functional activity, as measured by an appropriate quantitative assay with reproducibility comparable to a wild-type Shiga toxin effector polypeptide control (e.g. a Shiga toxin A1 fragment). For in vitro ribosome inhibition, significant Shiga toxin effector function is exhibiting an IC₅₀ of 300 pM or less depending on the source of the ribosomes used in the assay (e.g. a bacterial, archaeal, or eukaryotic (algal, fungal, plant, or animal) source). This is significantly greater inhibition as compared to the approximate IC₅₀ of 100,000 pM for the catalytically disrupted SLT-1A 1-251 double mutant (Y77S/E167D, numbering relative to SEQ ID NO: 1). For cytotoxicity in a target-positive cell-kill assay in laboratory cell culture, significant Shiga toxin effector function is exhibiting a CD₅₀ of 100, 50, 30 nM, or less, depending on the target biomolecule(s) of the binding region and the cell type, particularly that cell type's expression and/or cell-surface representation of the appropriate extracellular target biomolecule(s) and/or the extracellular epitope(s) targeted by the molecule being evaluated. This is significantly greater cytotoxicity to the appropriate, target-positive cell population as compared to a Shiga toxin A Subunit alone (or a wild-type Shiga toxin A1 fragment), without a cell targeting binding region, which has a CD₅₀ of 100-10,000 nM, depending on the cell line.

[0080] As used herein and with regard to the Shiga toxin effector function of a molecule as described herein, the term “reasonable activity” refers to exhibiting at least a moderate level (e.g. within 11-fold to 1,000-fold) of Shiga toxin effector activity as defined herein in relation to a molecule comprising a naturally occurring Shiga toxin, wherein the Shiga toxin effector activity is selected from the group consisting of: internalization efficiency, subcellular routing efficiency to the cytosol, delivered epitope presentation by a target cell(s), ribosome inhibition, and cytotoxicity. For cytotoxicity, a reasonable level of Shiga toxin effector activity includes being within 1,000-fold of a wild-type, Shiga toxin construct, such as, e.g., exhibiting a CD₅₀ of 500 nM or less when a wild-type Shiga toxin construct exhibits a CD₅₀ of 0.5 nM (e.g. a PD-L1 targeting molecule comprising a wild-type Shiga toxin A1 fragment).

[0081] As used herein and with regard to the cytotoxicity of a molecule described herein, the term “optimal” refers to a level of Shiga toxin catalytic domain mediated cytotoxicity that is within 2, 3, 4, 5, 6, 7, 8, 9, or 10-fold of the cytotoxicity of a molecule comprising wild-type Shiga toxin A1 fragment (e.g. a Shiga toxin A Subunit or certain truncated variants thereof) and/or a naturally occurring Shiga toxin.

[0082] It should be noted that even if the cytotoxicity of a Shiga toxin effector polypeptide is reduced relative to a wild-type Shiga toxin A Subunit or fragment thereof, in practice, applications using attenuated, Shiga toxin effector polypeptides might be equally or more effective than using wild-type Shiga toxin effector polypeptides because the highest potency variants might exhibit undesirable effects which are minimized or reduced in reduced cytotoxic-potency variants. Wild-type Shiga toxins are very potent, being able to kill an intoxicated cell after only one toxin molecule has reached the cytosol of the intoxicated cell or perhaps after only forty toxin molecules have been internalized into the intoxicated cell. Shiga toxin effector polypeptides with even considerably reduced Shiga toxin effector functions, such as, e.g., subcellular routing or cytotoxicity, as compared to wild-type Shiga toxin effector polypeptides might still be potent enough for practical applications, such as, e.g., applications involving targeted cell-killing, heterologous epitope delivery, and/or detection of specific cells and their subcellular compartments. In addition, certain reduced-activity Shiga toxin effector polypeptides may be particularly useful for delivering cargos (e.g. an additional exogenous material or T-cell epitope) to certain intracellular locations or subcellular compartments of target cells.

[0083] The term “selective cytotoxicity” with regard to the cytotoxic activity of a molecule refers to the relative level of cytotoxicity between a biomolecule target positive cell population (e.g. a targeted cell-type) and a non-targeted bystander cell population (e.g. a biomolecule target negative cell-type), which can be expressed as a ratio of the half-maximal cytotoxic concentration (CD₅₀) for a targeted cell type over the CD₅₀ for an untargeted cell type to provide a metric of cytotoxic selectivity or indication of the preferentiality of killing of a targeted cell versus an untargeted cell.

[0084] The cell surface representation and/or density of a given extracellular target biomolecule (or extracellular epitope of a given target biomolecule) may influence the applications for which certain PD-L1 targeting molecules may be most suitably used. Differences in cell surface representation and/or density of a given target biomolecule between cells may alter, both quantitatively and qualitatively, the efficiency of cellular internalization and/or cytotoxicity potency of a given PD-L1 targeting molecule. The cell surface representation and/or density of a given target biomolecule can vary greatly among target biomolecule positive cells or even on the same cell at different points in the cell cycle or cell differentiation. The total cell surface representation of a given target biomolecule and/or of certain extracellular epitopes of a given target biomolecule on a particular cell or population of cells may be determined using methods known to the skilled worker, such as methods involving fluorescence-activated cell sorting (FACS) flow cytometry.

[0085] As used herein, the terms “disrupted,” “disruption,” or “disrupting,” and grammatical variants thereof, with regard to a polypeptide region or feature within a polypeptide refers to an alteration of at least one amino acid within the region or composing the disrupted feature. Amino acid alterations include various mutations, such as, e.g., a deletion, inversion, insertion, or substitution which alter the amino acid sequence of the polypeptide. Amino acid alterations also include chemical changes, such as, e.g., the alteration one or more atoms in an amino acid functional group or the addition of one or more atoms to an amino acid functional group.

[0086] As used herein, “de-immunized” means reduced antigenic and/or immunogenic potential after administration to a chordate as compared to a reference molecule, such as, e.g., a wild-type peptide region, polypeptide region, or polypeptide. This includes a reduction in overall antigenic and/or immunogenic potential despite the introduction of one or more, de novo, antigenic and/or immunogenic epitopes as compared to a reference molecule. For some embodiments, “de-immunized” means a molecule exhibited reduced antigenicity and/or immunogenicity after administration to a mammal as compared to a “parental” molecule from which it was derived, such as, e.g., a wild-type Shiga toxin A1 fragment or PD-L1 targeting molecule comprising the aforementioned. In some embodiments, the de-immunized, Shiga toxin effector polypeptide is capable of exhibiting a relative antigenicity compared to a reference “parental” molecule which is reduced by 10%, 20%, 30%, 40%, 50%, 60%, 70%, 80%, 90%, or greater than the antigenicity of the reference molecule under the same conditions measured by the same assay, such as, e.g., an assay known to the skilled worker and/or described herein like a quantitative ELISA or Western blot analysis. In some embodiments, the de-immunized, Shiga toxin effector polypeptide is capable of exhibiting a relative immunogenicity compared to a reference “parental” molecule which is reduced by 10%, 20%, 30%, 40%, 50%, 60%, 70%, 80%, 90%, 95%, 97%, 99%, or greater than the immunogenicity of the reference molecule under the same conditions measured by the same assay, such as, e.g., an assay known to the skilled worker and/or described herein like a quantitative measurement of anti-molecule antibodies produced in a mammal(s) after receiving parenteral administration of the molecule at a given time-point.

[0087] The relative immunogenicities of PD-L1 targeting molecules may be determined using an assay for in vivo antibody responses to the PD-L1 targeting molecules after repeat, parenteral administrations over periods of time.

[0088] As used herein, the phrase “B-cell and/or CD4+ T-cell de-immunized” means that the molecule has a reduced antigenic and/or immunogenic potential after administration to a mammal regarding either B-cell antigenicity or immunogenicity and/or CD4+ T-cell antigenicity or immunogenicity. For some embodiments, “B-cell de-immunized” means a molecule exhibited reduced B-cell antigenicity and/or immunogenicity after administration to a mammal as compared to a “parental” molecule from which it was derived, such as, e.g., a wild-type Shiga toxin A1 fragment. For some embodiments, “CD4+ T-cell de-immunized” means a molecule exhibited reduced CD4 T-cell antigenicity and/or immunogenicity after administration to a mammal as compared to a “parental” molecule from which it was derived, such as, e.g., a wild-type Shiga toxin A1 fragment.

[0089] The term “endogenous” with regard to a B-cell epitope, CD4+ T-cell epitope, B-cell epitope region, or CD4+ T-cell epitope region in a Shiga toxin effector polypeptide refers to an epitope present in a wild-type Shiga toxin A Subunit.

[0090] As used herein, the phrase “CD8+ T-cell hyper-immunized” means that the molecule, when present inside a nucleated, chordate cell within a living chordate, has an increased antigenic and/or immunogenic potential regarding CD8+ T-cell antigenicity or immunogenicity. Commonly, CD8+ T-cell immunized molecules are capable of cellular internalization to an early endosomal compartment of a nucleated, chordate cell due either to an inherent feature(s) or as a component of a PD-L1 targeting molecule.

[0091] As used herein, the term “heterologous” means of a different source than an A Subunit of a naturally occurring Shiga toxin, e.g. a heterologous polypeptide is not naturally found as part of any A Subunit of a native Shiga toxin. The term “heterologous” with regard to T-cell epitope or T-cell epitope-peptide component of a PD-L1 targeting molecule refers to an epitope or peptide sequence which did not initially occur in the polypeptide component to be modified, but which has been added to the polypeptide, whether added via the processes of embedding, fusion, insertion, and/or amino acid substitution as described herein, or by any other engineering means. The result is a modified polypeptide comprising a T-cell epitope foreign to the original, unmodified polypeptide, i.e. the T-cell epitope was not present in the original polypeptide.

[0092] The term “embedded” and grammatical variants thereof with regard to a T-cell epitope or T-cell epitope-peptide component of a PD-L1 targeting molecule refers to the internal replacement of one or more amino acids within a polypeptide region with different amino acids in order to generate a new polypeptide sequence sharing the same total number of amino acid residues with the starting polypeptide region. Thus, the term “embedded” does not include any external, terminal fusion of any additional amino acid, peptide, or polypeptide component to the starting polypeptide nor any additional internal insertion of any additional amino acid residues, but rather includes only substitutions for existing amino acids. The internal replacement may be accomplished merely by amino acid residue substitution or by a series of substitutions, deletions, insertions, and/or inversions. If an insertion of one or more amino acids is used, then the equivalent number of proximal amino acids must be deleted next to the insertion to result in an embedded T-cell epitope. This is in contrast to use of the term “inserted” with regard to a T-cell epitope contained within a polypeptide component of a PD-L1 targeting molecule to refer to the insertion of one or more amino acids internally within a polypeptide resulting in a new polypeptide having an increased number of amino acids residues compared to the starting polypeptide.

[0093] The term “inserted” and grammatical variants thereof with regard to a T-cell epitope contained within a polypeptide component of a PD-L1 targeting molecule refers to the insertion of one or more amino acids within a polypeptide resulting in a new polypeptide sequence having an increased number of amino acids residues compared to the starting polypeptide. The “pure” insertion of a T-cell epitope-peptide is when the resulting polypeptide increased in length by the number of amino acid residues equivalent to the number of amino acid residues in the entire, inserted T-cell epitope-peptide. The phrases “partially inserted,” “embedded and inserted,” and grammatical variants thereof with regard to a T-cell epitope contained within a polypeptide component of a PD-L1 targeting molecule, refers to when the resulting polypeptide increased in length, but by less than the number of amino acid residues equivalent to the length of the entire, inserted T-cell epitope-peptide. Insertions, whether “pure” or “partial,” include any of the previously described insertions even if other regions of the polypeptide not proximal to the insertion site within the polypeptide are deleted thereby resulting in a decrease in the total length of the final polypeptide because the final polypeptide still comprises an internal insertion of one or more amino acids of a T-cell epitope-peptide within a polypeptide region.

[0094] As used herein, the term “T-cell epitope delivering” when describing a functional activity of a molecule means that a molecule provides the biological activity of localizing within a cell to a subcellular compartment that is competent to result in the proteasomal cleavage of a proteinaceous part of the molecule which comprises a T-cell epitope-peptide. The “T-cell epitope delivering” function of a molecule can be assayed by observing the MHC presentation of a T-cell epitope-peptide cargo of the molecule on a cell surface of a cell to which the molecule is exogenously administered, or in which the assay was begun with the cell containing the molecule in one or more of its endosomal compartments. Generally, the ability of a molecule to deliver a T-cell epitope to a proteasome can be determined where the initial location of the “T-cell epitope delivering” molecule is an early endosomal compartment of a cell, and then, the molecule is empirically shown to deliver the epitope-peptide to the proteasome of the cell. However, a “T-cell epitope delivering” ability may also be determined where the molecule starts at an extracellular location and is empirically shown, either directly or indirectly, to deliver the epitope into a cell and to proteasomes of the cell. For example, certain “T-cell epitope delivering” molecules pass through an endosomal compartment of the cell, such as, e.g. after endocytotic entry into that cell. Alternatively, “T-cell epitope delivering” activity may be observed for a molecule starting at an extracellular location whereby the molecule does not enter any endosomal compartment of a cell—instead the “T-cell epitope delivering” molecule enters a cell and delivers a T-cell epitope-peptide to proteasomes of the cell, presumably because the “T-cell epitope delivering” molecule directed its own routing to a subcellular compartment competent to result in proteasomal cleavage of its T-cell epitope-peptide component.

[0095] As used herein, the phrase “proximal to an amino-terminus” with reference to the position of a Shiga toxin effector polypeptide region of a PD-L1 targeting molecule refers to a distance wherein at least one amino acid residue of the Shiga toxin effector polypeptide region is within 1, 2, 3, 4, 5, 6, 7, 8, 9, 10, 11, 12 or more, e.g., up to 18-20 amino acid residues, of an amino-terminus of the PD-L1 targeting molecule as long as the PD-L1 targeting molecule is capable of exhibiting the appropriate level of Shiga toxin effector functional activity noted herein (e.g., a certain level of cytotoxic potency). Thus for some embodiments, any amino acid residue(s) fused amino-terminal to the Shiga toxin effector polypeptide should not reduce any Shiga toxin effector function (e.g., by sterically hindering a structure(s) near the amino-terminus of the Shiga toxin effector polypeptide region) such that a functional activity of the Shiga toxin effector polypeptide is reduced below the appropriate activity level required herein.

[0096] As used herein, the phrase “more proximal to an amino-terminus” with reference to the position of a Shiga toxin effector polypeptide region within a PD-L1 targeting molecule as compared to another component (e.g., a cell-targeting, binding region, molecular moiety, and/or additional exogenous material) refers to a position wherein at least one amino acid residue of the amino-terminus of the Shiga toxin effector polypeptide is closer to the amino-terminus of a linear, polypeptide component of the PD-L1 targeting molecule as compared to the other referenced component.

[0097] As used herein, the phrase “active enzymatic domain derived from one A Subunit of a member of the Shiga toxin family” refers to having the ability to inhibit protein synthesis via a catalytic ribosome inactivation mechanism. The enzymatic activities of naturally occurring Shiga toxins may be defined by the ability to inhibit protein translation using assays known to the skilled worker, such as, e.g., in vitro assays involving RNA translation in the absence of living cells or in vivo assays involving RNA translation in a living cell. Using assays known to the skilled worker and/or described herein, the potency of a Shiga toxin enzymatic activity may be assessed directly by observing N-glycosidase activity toward ribosomal RNA (rRNA), such as, e.g., a ribosome nicking assay, and/or indirectly by observing inhibition of ribosome function and/or protein synthesis.

[0098] As used herein, the term “Shiga toxin A1 fragment region” refers to a polypeptide region consisting essentially of a Shiga toxin A1 fragment and/or derived from a Shiga toxin A1 fragment of a Shiga toxin.

[0099] As used herein, the terms “terminus,” “amino-terminus,” or “carboxy-terminus” with regard to a PD-L1 targeting molecule refers generally to the last amino acid residue of a polypeptide chain of the PD-L1 targeting molecule (e.g., a single, continuous polypeptide chain). A PD-L1 targeting molecule may comprise more than one polypeptide or protein, and, thus, a PD-L1 targeting molecule may comprise multiple amino-terminals and carboxy-terminals. For example, the “amino-terminus” of a PD-L1 targeting molecule may be defined by the first amino acid residue of a polypeptide chain representing the amino-terminal end of the polypeptide, which is generally characterized by a starting, amino acid residue which does not have a peptide bond with any amino acid residue involving the primary amino group of the starting amino acid residue or involving the equivalent nitrogen for starting amino acid residues which are members of the class of N-alkylated alpha amino acid residues. Similarly, the “carboxy-terminus” of a PD-L1 targeting molecule may be defined by the last amino acid residue of a polypeptide chain representing the carboxyl-terminal end of the polypeptide, which is generally characterized by a final, amino acid residue which does not have any amino acid residue linked by a peptide bond to the alpha-carbon of its primary carboxyl group.

[0100] As used herein, the terms “terminus,” “amino-terminus,” or “carboxy-terminus” with regard to a polypeptide region refers to the regional boundaries of that region, regardless of whether additional amino acid residues are linked by peptide bonds outside of that region. In other words, the terminals of the polypeptide region regardless of whether that region is fused to other peptides or polypeptides. For example, a fusion protein comprising two proteinaceous regions, e.g., a binding region comprising a peptide or polypeptide and a Shiga toxin effector polypeptide, may have a Shiga toxin effector polypeptide region with a carboxy-terminus ending at amino acid residue 251 of the Shiga toxin effector polypeptide region despite a peptide bond involving residue 251 to an amino acid residue at position 252 representing the beginning of another proteinaceous region, e.g., the binding region. In this example, the carboxy-terminus of the Shiga toxin effector polypeptide region refers to residue 251, which is not a terminus of the fusion protein but rather represents an internal, regional boundary. Thus, for polypeptide regions, the terms “terminus,” “amino-terminus,” and “carboxy-terminus” are used to refer to the boundaries of polypeptide regions, whether the boundary is a physically terminus or an internal, position embedded within a larger polypeptide chain.

[0101] As used herein, the phrase “carboxy-terminus region of a Shiga toxin A1 fragment” refers to a polypeptide region derived from a naturally occurring Shiga toxin A1 fragment, the region beginning with a hydrophobic residue (e.g., V236 of StxA-A1 and SLT-1A1, and V235 of SLT-2A1) that is followed by a hydrophobic residue and the region ending with the furin-cleavage site conserved among Shiga toxin A1 fragment polypeptides and ending at the junction between the A1 fragment and the A2 fragment in native, Shiga toxin A Subunits. In some embodiments, the carboxy-terminal region of a Shiga toxin A1 fragment includes a peptidic region derived from the carboxy-terminus of a Shiga toxin A1 fragment polypeptide, such as, e.g., a peptidic region comprising or consisting essentially of the carboxy-terminus of a Shiga toxin A1 fragment. Non-limiting examples of peptidic regions derived from the carboxy-terminus of a Shiga toxin A1 fragment include the amino acid residue sequences natively positioned from position 236 to position 239, 240, 241, 242, 243, 244, 245, 246, 247, 248, 249, 250, or 251 in Stx1A (SEQ ID NO:2) or SLT-1A (SEQ ID NO:1); and from position 235 to position 239, 240, 241, 242, 243, 244, 245, 246, 247, 248, 249, or 250 in SLT-2A (SEQ ID NO:3).

[0102] As used herein, the phrase “proximal to the carboxy-terminus of an A1 fragment polypeptide” with regard to a linked molecular moiety and/or binding region refers to being within 1, 2, 3, 4, 5, 6, 7, 8, 9, 10, 11, or 12 amino acid residues from the amino acid residue defining the last residue of the Shiga toxin A1 fragment polypeptide.

[0103] As used herein, the phrase “sterically covers the carboxy-terminus of the A1 fragment-derived region” includes any molecular moiety of a size of 4.5 kDa or greater (e.g., an immunoglobulin-type binding region) linked and/or fused to an amino acid residue in the carboxy-terminus of the A1 fragment-derived region, such as, e.g., the amino acid residue derived from the amino acid residue natively positioned at any one of positions 236 to 251 in Stx1A (SEQ ID NO:2) or SLT-1A (SEQ ID NO:1) or from 235 to 250 in SLT-2A (SEQ ID NO:3). As used herein, the phrase “sterically covers the carboxy-terminus of the A1 fragment-derived region” also includes any molecular moiety of a size of 4.5 kDa or greater (e.g., an immunoglobulin-type binding region) linked and/or fused to an amino acid residue in the carboxy-terminus of the A1 fragment-derived region, such as, e.g., the amino acid residue carboxy-terminal to the last amino acid A1 fragment-derived region and/or the Shiga toxin effector polypeptide. As used herein, the phrase “sterically covers the carboxy-terminus of the A1 fragment-derived region” also includes any molecular moiety of a size of 4.5 kDa or greater (e.g., an immunoglobulin-type binding region) physically preventing cellular recognition of the carboxy-terminus of the A1 fragment-derived region, such as, e.g. recognition by the ERAD machinery of a eukaryotic cell.

[0104] As described herein, a binding region, such as, e.g., an immunoglobulin-type binding region, that comprises a polypeptide comprising at least forty amino acids and that is linked (e.g., fused) to the carboxy-terminus of the Shiga toxin effector polypeptide region comprising an A1 fragment-derived region is a molecular moiety which is “sterically covering the carboxy-terminus of the A1 fragment-derived region.”

[0105] As described herein, a binding region, such as, e.g., an immunoglobulin-type binding region, that comprises a polypeptide comprising at least forty amino acids and that is linked (e.g., fused) to the carboxy-terminus of the Shiga toxin effector polypeptide region comprising an A1 fragment-derived region is a molecular moiety “encumbering the carboxy-terminus of the A1 fragment-derived region.”

[0106] As used herein, the term “A1 fragment of a member of the Shiga toxin family” refers to the remaining amino-terminal fragment of a Shiga toxin A Subunit after proteolysis by furin at the furin-cleavage site conserved among Shiga toxin A Subunits and positioned between the A1 fragment and the A2 fragment in wild-type Shiga toxin A Subunits.

[0107] As used herein, the phrase “furin-cleavage site at the carboxy-terminus of the A1 fragment region” refers to a specific, furin-cleavage siteconserved among Shiga toxin A Subunits and bridging the junction between the A1 fragment and the A2 fragment in naturally occurring, Shiga toxin A Subunits.

[0108] As used herein, the phrase “furin-cleavage site proximal to the carboxy-terminus of the A1 fragment region” refers to any identifiable, furin-cleavage site having an amino acid residue within a distance of less than 1, 2, 3, 4, 5, 6, 7, or more amino acid residues of the amino acid residue defining the last amino acid residue in the A1 fragment region or A1 fragment derived region, including a furin-cleavage site located carboxy-terminal of an A1 fragment region or A1 fragment derived region, such as, e.g., at a position proximal to the linkage of the A1 fragment-derived region to another component of the molecule, such as, e.g., a molecular moiety of a PD-L1 targeting molecule.

[0109] As used herein, the phrase “disrupted furin-cleavage site” refers to (i) a specific furin-cleavage site as described herein in Section I-B and (ii) which comprises a mutation and/or truncation that can confer a molecule with a reduction in furin-cleavage as compared to a reference molecule, such as, e.g., a reduction in furin-cleavage reproducibly observed to be 30%, 40%, 50%, 60%, 70%, 80%, 90%, 95%, 97%, 98%, 99%, or less (including 100% for no cleavage) than the furin-cleavage of a reference molecule observed in the same assay under the same conditions. The percentage of furin-cleavage as compared to a reference molecule can be expressed as a ratio of cleaved:uncleaved material of the molecule of interest divided by the cleaved:uncleaved material of the reference molecule (see e.g. WO 2015/191764; WO 2016/196344). Non-limiting examples of suitable reference molecules include certain molecules comprising a wild-type Shiga toxin furin-cleavage site and/or furin-cleavage site as described herein.

[0110] As used herein, the phrase “furin-cleavage resistant” means a molecule or specific polypeptide region thereof exhibits reproducibly less furin cleavage than (i) the carboxy-terminus of a Shiga toxin A1 fragment in a wild-type Shiga toxin A Subunit or (ii) the carboxy-terminus of the Shiga toxin A1 fragment derived region of construct wherein the naturally occurring furin-cleavage site natively positioned at the junction between the A1 and A2 fragments is not disrupted; as assayed by any available means to the skilled worker, including by using a method described herein.

[0111] As used herein, the phrase “active enzymatic domain derived form an A Subunit of a member of the Shiga toxin family” refers to a polypeptide structure having the ability to inhibit protein synthesis via catalytic inactivation of a ribosome based on a Shiga toxin enzymatic activity. The ability of a molecular structure to exhibit inhibitory activity of protein synthesis and/or catalytic inactivation of a ribosome may be observed using various assays known to the skilled worker, such as, e.g., in vitro assays involving RNA translation assays in the absence of living cells or in vivo assays involving the ribosomes of living cells. For example, using assays known to the skilled worker, the enzymatic activity of a molecule based on a Shiga toxin enzymatic activity may be assessed directly by observing N-glycosidase activity toward ribosomal RNA (rRNA), such as, e.g., a ribosome nicking assay, and/or indirectly by observing inhibition of ribosome function, RNA translation, and/or protein synthesis.

[0112] As used herein with respect to a Shiga toxin effector polypeptide, a “combination” describes a Shiga toxin effector polypeptide comprising two or more sub-regions wherein each sub-region comprises at least one of the following: (1) a disruption in an endogenous epitope or epitope region; (2) an embedded, heterologous, T-cell epitope-peptide; (3) an inserted, heterologous, T-cell epitope-peptide; and (4) a disrupted furin-cleavage site at the carboxy-terminus of an A1 fragment region.

[0113] As used herein, a “PD-L1+PD-L1 targeting molecule” is used interchangeably with a “PD-L1 targeting molecule” or “PD-L1-binding molecule”. As used herein, the terms “PD-L1 targeting molecule”, “PD-L1-binding molecule”, and “PD-L1 targeting molecule” are used interchangably, and such molecules may also be referred to as “DI-SLT-1A fusion proteins” and “SLT-1A fusion proteins.” All of the aforementioned molecule types include various “PD-L1-binding proteins.”

### INTRODUCTION

[0114] Provided herein are various PD-L1 targeting molecules which bind PD-L1 and comprise a Shiga toxin A Subunit effector polypeptide (referred to herein as “PD-L1 targeting molecules”). The PD-L1 targeting molecules described herein are useful, for example, (1) as cytotoxic molecules for killing PD-L1 expressing cells, (2) for selectively killing specific PD-L1 positive cell type(s) amongst other cells, (3) as nontoxic delivery vehicles for delivering an atom or molecule to the interior of a PD-L1 expressing cell, (4) as diagnostic molecules for the diagnosis, prognosis, or characterization of diseases and conditions involving PD-L1 expressing cells, and (5) as therapeutic molecules for treating a variety of diseases, disorders, and conditions involving PD-L1 expressing cells, such as various cancers and tumors.

[0115] Shiga toxin A Subunit effector polypeptides provide robust and powerful scaffolds for engineering novel, PD-L1 targeting molecules (see e.g. WO 2014/164680, WO 2014/164693, WO 2015/138435, WO 2015/138452, WO 2015/113005, WO 2015/113007, WO 2015/191764, WO 2016/196344, WO 2017/019623, WO 2018/106895, and WO 2018/140427). The association of PD-L1 binding immunoglobulin-derived fragments as cell-targeting moieties with Shiga toxin A Subunit effector polypeptides enables the engineering of therapeutic and diagnostic molecules that target PD-L1.

### I. The General Structure of the PD-L1 Targeting Molecules

[0116] In some embodiments, the PD-L1 targeting molecules may each comprise (1) a PD-L1 binding region for cell-targeting, and (2) a Shiga toxin effector polypeptide. In some embodiments, a PD-L1 targeting molecule may comprise (1) a binding region capable of specifically binding an extracellular part of PD-L1 associated with a cell surface and (2) a Shiga toxin effector polypeptide region comprising a Shiga toxin A Subunit effector polypeptide (referred to herein as a “Shiga toxin effector polypeptide”). In some embodiments, the PD-L1 binding molecule comprises two or more PD-L1 binding regions, whether the same or different, and two or more Shiga toxin effector polypeptide regions, whether the same or different. One non-limiting example of a PD-L1 targeting molecule comprises a Shiga toxin effector polypeptide fused to an immunoglobulin-type binding region comprising a single-chain variable fragment, or a homo- or hetero-dimer of the aforementioned.

[0117] The PD-L1 targeting molecules may optionally comprise a T-cell epitope for delivery to the interior of a target cell and subsequent cell-surface presentation.

[0118] In some embodiments, the Shiga toxin A Subunit effector polypeptide of the PD-L1 targeting molecule combines structural elements resulting in two or more properties in a single molecule, such as, e.g., the ability to 1) exhibit reduced antigenicity and/or immunogenicity as compared to molecular variants lacking that particular combination of elements, 2) exhibit reduced protease-cleavage as compared to molecular variants lacking that particular combination of elements, 3) exhibit reduced non-specific toxicity to a multicellular organism at certain dosages as compared to molecular variants lacking that particular combination of elements, 4) deliver an embedded or inserted T-cell epitope to the MHC class I system of a cell for cell-surface presentation, and/or 5) exhibit potent cytotoxicity.

### A. PD-L1 Binding Regions

[0119] In some embodiments, the PD-L1 targeting molecule comprises a binding region comprising an immunoglobulin-type polypeptide capable of exhibiting specific and high-affinity binding to human PD-L1 and/or PD-L1 present on a cellular surface of a cell, such as, e.g., PD-L1 expressing cell or PD-L1 positive cell.

[0120] In some embodiments, a binding region of a PD-L1 targeting molecule is a cell-targeting component, such as, e.g., a domain, molecular moiety, or agent, capable of binding specifically to an extracellular part of a PD-L1 target biomolecule on a cell surface (i.e. an extracellular target biomolecule) with high affinity. As used herein, the term “PD-L1 binding region” refers to a molecular moiety (e.g. a proteinaceous molecule) or agent capable of specifically binding an extracellular part of a PD-L1 molecule with high affinity, such as, e.g., having a dissociation constant with regard to PD-L1 of 10⁻⁵ to 10⁻¹² moles per liter. As used herein, PD-L1 binding refers to the ability to bind to an extracellular part of PD-L1, including an isoform or variant of human PD-L1.

[0121] An extracellular part of a target biomolecule refers to a portion of its structure exposed to the extracellular environment when the molecule is physically coupled to a cell, such as, e.g., when the target biomolecule is expressed at a cellular surface by the cell. In this context, exposed to the extracellular environment means that part of the target biomolecule is accessible by, e.g., an antibody or at least a binding moiety smaller than an antibody such as a single-domain antibody domain, a nanobody, a heavy-chain antibody domain derived from camelids or cartilaginous fishes, a single-chain variable fragment, or any number of engineered alternative scaffolds to immunoglobulins (see below). The exposure to the extracellular environment of or accessibility to a part of target biomolecule physically coupled to a cell may be empirically determined by the skilled worker using methods well known in the art.

[0122] In some embodiments, a PD-L1 targeting molecule comprises a binding region comprising one or more polypeptides capable of selectively and specifically binding an extracellular part of PD-L1.

[0123] In some embodiments, the PD-L1 binding region is an immunoglobulin-type binding region. In some embodiments, the immunoglobulin-type, PD-L1 binding region is derived from an immunoglobulin, PD-L1 binding region, such as an antibody paratope capable of binding an extracellular part of PD-L1. This engineered polypeptide may optionally include polypeptide scaffolds comprising or consisting essentially of complementary determining regions and/or antigen binding regions from immunoglobulins as described herein.

[0124] In some embodiments, the binding region comprises a polypeptide comprising an immunoglobulin-type binding region. In some embodiments, the binding region comprises a heavy chain variable region (HVR-H) comprising three CDRs, each having at least 85%, 90%, 91%, 92%, 93%, 94%, 95%, 96%, 97%, 98%, or 99% identity to SEQ ID NO:22, SEQ ID NO:23, SEQ ID NO:24, SEQ ID NO:36, or SEQ ID NO:37; or consisting essentially of an amino acid sequence show in any one of SEQ ID NO:22, SEQ ID NO:23, SEQ ID NO:24, SEQ ID NO:36, and SEQ ID NO:37. In some embodiments, the binding region further comprises: (a) a light chain variable region (HVR-L) comprising three CDRs, having at least 85%, 90%, 91%, 92%, 93%, 94%, 95%, 96%, 97%, 98%, or 99% identity to SEQ ID NO:19, SEQ ID NO:20, and SEQ ID NO:21; or consisting essentially of an amino acid sequence shown in any one of SEQ ID NO:19, SEQ ID NO:20, and SEQ ID NO:21. In some embodiments, the binding region comprises: (a) a light chain variable region (HVR-L) comprising three CDRs, each comprising or consisting essentially of an amino acid sequence shown in any one of SEQ ID NO:19, SEQ ID NO:20, and SEQ ID NO:21; and (b) a heavy chain variable region (HVR-H) comprising three CDRs, each comprising or consisting essentially of an amino acid sequence show in any one of SEQ ID NO:22, SEQ ID NO:23, SEQ ID NO:24, SEQ ID NO:36, and SEQ ID NO:37.

[0125] In some embodiments, the binding region comprises: (a) a light chain variable region (HVR-L) comprising three CDRs, each comprising or consisting essentially of an amino acid sequence shown in any one of SEQ ID NO:19, SEQ ID NO:20, and SEQ ID NO:21; and/or (b) a heavy chain variable region (HVR-H) comprising three CDRs, each comprising or consisting essentially of an amino acid sequence show in any one of SEQ ID NO:22, SEQ ID NO:23, SEQ ID NO:24, SEQ ID NO:36, and SEQ ID NO:37.

[0126] In some embodiments, the binding region comprises: (a) a light chain variable region comprising: (i) HVR-L1 comprising or consisting essentially of the amino acid sequence TGTSSDVGSYNRVS (SEQ ID NO:19), (ii) HVR-L2 comprising or consisting essentially of the amino acid sequence EVSNRPS (SEQ ID NO:20), and (iii) HVR-L3 comprising or consisting essentially of the amino acid sequence SSHTTSGTYV (SEQ ID NO:21); and/or (b) a heavy chain variable region comprising: (i) HVR-H1 comprising or consisting essentially of the amino acid sequence SYAIS (SEQ ID NO:22), (ii) HVR-H2 comprising or consisting essentially of the amino acid sequence GIIPIFGTANYAQKFQG (SEQ ID NO:23), and (iii) HVR-H3 comprising or consisting essentially of the amino acid sequence DQGYAHAFDI (SEQ ID NO:24).

[0127] In some embodiments, the binding region comprises: (a) a light chain variable region (HVR-L) comprising three CDRs: (i) a LCDR1 comprising or consisting essentially of the amino acid sequence TGTSSDVGSYNRVS (SEQ ID NO:19), (ii) a LCDR2 comprising or consisting essentially of the amino acid sequence EVSNRPS (SEQ ID NO:20), and (iii) a LCDR3 comprising or consisting essentially of the amino acid sequence SSHTTSGTYV (SEQ ID NO:21); and/or (b) a heavy chain variable region (HVR-H) comprising: (i) a HCDR1 comprising or consisting essentially of the amino acid sequence GGTFSSY (SEQ ID NO:22), (ii) a HCDR2 comprising or consisting essentially of the amino acid sequence IPIFGT (SEQ ID NO:23), and (iii) a HCDR3 comprising or consisting essentially of the amino acid sequence DQGYAHAFDI (SEQ ID NO:24).

[0128] In some embodiments, the binding region comprises: an immunoglobulin region comprising three CDRs comprising or consisting essentially of the amino acid sequences show in SEQ ID NO:22, SEQ ID NO:23, and SEQ ID NO:24, respectively.

[0129] In some embodiments, the binding region comprises an immunoglobulin region comprising three CDRs comprising or consisting essentially of the amino acid sequences show in SEQ ID NO:22, SEQ ID NO:37, and SEQ ID NO:24, respectively.

[0130] In some embodiments, the binding region comprises three CDRs comprising or consisting essentially of the amino acid sequences show in SEQ ID NO:36, SEQ ID NO:23, and SEQ ID NO:24, respectively.

[0131] In some embodiments, the binding region comprises an immunoglobulin region comprising three CDRs comprising or consisting essentially of the amino acid sequences show in SEQ ID NO:36, SEQ ID NO:37, and SEQ ID NO:24, respectively.

[0132] In some embodiments, the binding region comprises: (a) a light chain region having at least 85%, 90%, 91%, 92%, 93%, 94%, 95%, 96%, 97%, 98%, or 99%, identity to SEQ ID NO:25 or SEQ ID NO:27 or consisting essentially of the amino acid sequence of SEQ ID NO:25 or SEQ ID NO:27; and/or (b) a heavy chain region having at least 85%, 90%, 91%, 92%, 93%, 94%, 95%, 96%, 97%, 98%, or 99% identity to SEQ ID NO:26 or consisting essentially of the amino acid sequence of SEQ ID NO:26.

[0133] In some embodiments, the binding region comprises a polypeptide having at least 85%, 90%, 91%, 92%, 93%, 94%, 95%, 96%, 97%, 98%, or 99% identity to any one of SEQ ID NOs: 28-35 and 38-40 or consists essentially of the polypeptide shown in any one of SEQ ID NOs: 28-35 and 38-40.

[0134] In some embodiments, the binding region is a single-chain variable fragment, such as, e.g., consisting of, comprising, or consisting essentially of the polypeptide of any one of SEQ ID NOs: 28-35 and 38-40.

[0135] In some embodiments, the binding region comprises a polypeptide(s) selected from the group consisting of: (a) a heavy chain variable (V_{H}) domain comprising (i) a HCDR1 comprising or consisting essentially of the amino acid sequence of SEQ ID NO:36 or SEQ ID NO: 22; (ii) a HCDR2 comprising or consisting essentially of the amino acid sequence of SEQ ID NO: 37 or SEQ ID NO: 23; and/or (iii) a HCDR3 comprising or consisting essentially of the amino acid sequence of SEQ ID NO:24; and/or (b) a light chain variable (V_{L}) domain comprising (i) a LCDR1 comprising or consisting essentially of the amino acid sequence of SEQ ID NO:19; (ii) a LCDR2 comprising or consisting essentially of the amino acid sequence of SEQ ID NO:20; and/or (iii) a LCDR3 comprising or consisting essentially of the amino acid sequence of SEQ ID NO:21.

[0136] A binding region of a PD-L1 targeting molecule may be, e.g., a monoclonal antibody or engineered antibody derivative.

[0137] In some embodiments, the binding region is an antibody fragment, e.g., a Fv, Fab, Fab′, scFv, diabody, or F(ab′) 2 fragment. In another embodiment, the binding region is a full-length antibody, e.g., an intact IgG1 antibody or other antibody class or isotype as defined herein.

[0138] In some embodiments, the binding region is a synthetically engineered antibody derivate, such as, e.g. an autonomous V_{H} domain (such as, e.g., from camelids, murine, or human sources), single-domain antibody domain (sdAb), heavy-chain antibody domains derived from a camelid (V_{H}H fragment or V_{H} domain fragment), heavy-chain antibody domains derived from a camelid V_{H}H fragments or V_{H} domain fragments, heavy-chain antibody domain derived from a cartilaginous fish, immunoglobulin new antigen receptor (IgNAR), V_{NAR} fragment, single-chain variable (scFv) fragment, nanobody, “camelized” scaffolds comprising a V_{H} domain, Fd fragment consisting of the heavy chain and C_{H}1 domains, single chain Fv-C_{H}3 minibody, Fc antigen binding domain (Fcabs), scFv-Fc fusion, multimerizing scFv fragment (diabodies, triabodies, tetrabodies), disulfide-stabilized antibody variable (Fv) fragment (dsFv), disulfide-stabilized antigen-binding (Fab) fragment consisting of the V_{L}, V_{H}, C_{L} and C_{H}1 domains, single-chain variable-region fragments comprising a disulfide-stabilized heavy and light chain (sc-dsFvs), bivalent nanobodies, bivalent minibodies, bivalent F(ab′)₂ fragments (Fab dimers), bispecific tandem V_{H}H fragments, bispecific tandem scFv fragments, bispecific nanobodies, bispecific minibodies, and any genetically manipulated counterparts of the foregoing that retain its paratope and binding function, such as, e.g., wherein the relative orientation or order of the heavy and light chains is reversed or flipped.

[0139] According to one specific, but non-limiting aspect, the binding region may comprise an immunoglobulin-type binding region. The term “immunoglobulin-type binding region” as used herein refers to a polypeptide region capable of binding one or more target biomolecules, such as an antigen or epitope. Binding regions may be functionally defined by their ability to bind to target molecules. Immunoglobulin-type binding regions are commonly derived from antibody or antibody-like structures.

[0140] Immunoglobulin (Ig) proteins have a structural domain known as an Ig domain. Ig domains range in length from about 70-110 amino acid residues and possess a characteristic Ig-fold, in which typically 7 to 9 antiparallel beta strands arrange into two beta sheets which form a sandwich-like structure. The Ig fold is stabilized by hydrophobic amino acid interactions on inner surfaces of the sandwich and highly conserved disulfide bonds between cysteine residues in the strands. Ig domains may be variable (IgV or V-set), constant (IgC or C-set) or intermediate (IgI or I-set). Some Ig domains may be associated with a complementarity determining region (CDR), also called a “complementary determining region,” which is important for the specificity of antibodies binding to their epitopes. Ig-like domains are also found in non-immunoglobulin proteins and are classified on that basis as members of the Ig superfamily of proteins. The HUGO Gene Nomenclature Committee (HGNC) provides a list of members of the Ig-like domain containing family.

[0141] An immunoglobulin-type binding region may be a polypeptide sequence of an antibody or antigen-binding fragment thereof wherein the amino acid sequence has been varied from that of a native antibody or an Ig-like domain of a non-immunoglobulin protein, for example by molecular engineering or selection by library screening. Because of the relevance of recombinant DNA techniques and in vitro library screening in the generation of immunoglobulin-type binding regions, antibodies can be redesigned to obtain desired characteristics, such as smaller size, cell entry, or other improvements for in vivo and/or therapeutic applications. The possible variations are many and may range from the changing of just one amino acid to the complete redesign of, for example, a variable region. Typically, changes in the variable region will be made in order to improve the antigen-binding characteristics, improve variable region stability, or reduce the potential for immunogenic responses.

[0142] There are numerous immunoglobulin-type binding regions contemplated as components of the molecules described herein. In some embodiments, the immunoglobulin-type binding region is derived from an immunoglobulin binding region, such as an antibody paratope capable of binding an extracellular part of PD-L1. In certain other embodiments, the immunoglobulin-type binding region comprises an engineered polypeptide not derived from any immunoglobulin domain but which functions like an immunoglobulin binding region by providing high-affinity binding to an extracellular part of PD-L1. This engineered polypeptide may optionally include polypeptide scaffolds comprising or consisting essentially of complementary determining regions from immunoglobulins as described herein.

[0143] There are also numerous binding regions in the prior art that are useful for targeting polypeptides to specific cell-types via their high-affinity binding characteristics. In some embodiments, the binding region of the PD-L1 targeting molecule is selected from the group which includes autonomous V_{H} domains, single-domain antibody domains (sdAbs), heavy-chain antibody domains derived from camelids (V_{H}H fragments or V_{H} domain fragments), heavy-chain antibody domains derived from camelid V_{H}H fragments or V_{H} domain fragments, heavy-chain antibody domains derived from cartilaginous fishes, immunoglobulin new antigen receptors (IgNARs), V_{NAR} fragments, single-chain variable (scFv) fragments, nanobodies, Fd fragments consisting of the heavy chain and C_{H}1 domains, single chain Fv-C_{H}3 minibodies, dimeric C_{H}2 domain fragments (C_{H}2D), Fc antigen binding domains (Fcabs), isolated complementary determining region 3 (CDR3) fragments, constrained framework region 3, CDR3, framework region 4 (FR3-CDR3-FR4) polypeptides, small modular immunopharmaceutical (SMIP) domains, scFv-Fc fusions, multimerizing scFv fragments (diabodies, triabodies, tetrabodies), disulfide stabilized antibody variable (Fv) fragments, disulfide stabilized antigen-binding (Fab) fragments consisting of the V_{L}, V_{H}, C_{L} and C_{H}1 domains, bivalent nanobodies, bivalent minibodies, bivalent F(ab′)₂ fragments (Fab dimers), bispecific tandem V_{H}H fragments, bispecific tandem scFv fragments, bispecific nanobodies, bispecific minibodies, and any genetically manipulated counterparts of the foregoing that retain its paratope and binding function, such as, e.g., wherein the relative orientation or order of the heavy and light chains is reversed or flipped (see Ward E et al., Nature 341: 544-6 (1989); Davies J, Riechmann L, Biotechnology (NY) 13: 475-9 (1995); Reiter Y et al., Mol Biol 290: 685-98 (1999); Riechmann L, Muyldermans S, J Immunol Methods 231: 25-38 (1999); Tanha J et al., J Immunol Methods 263: 97-109 (2002); Vranken W et al., Biochemistry 41: 8570-9 (2002); Jespers L et al., J Mol Biol 337: 893-903 (2004); Jespers L et al., Nat Biotechnol 22: 1161-5 (2004); To R et al., J Biol Chem 280: 41395-403 (2005); Saerens D et al., Curr Opin Pharmacol 8: 600-8 (2008); Dimitrov D, MAbs 1:26-8 (2009); Weiner L, Cell 148: 1081-4 (2012); Ahmad Z et al., Clin Dev Immunol 2012: 980250 (2012)).

[0144] There are a variety of binding regions comprising polypeptides derived from the constant regions of immunoglobulins, such as, e.g., engineered dimeric Fc domains, monomeric Fcs (mFcs), scFv-Fcs, V_{H}H-Fcs, C_{H}2 domains, monomeric C_{H}3s domains (mC_{H}3s), synthetically reprogrammed immunoglobulin domains, and/or hybrid fusions of immunoglobulin domains with ligands (Hofer T et al., Proc Natl Acad Sci U.S.A 105: 12451-6 (2008); Xiao J et al., J Am Chem Soc 131: 13616-13618 (2009); Xiao X et al., Biochem Biophys Res Commun 387: 387-92 (2009); Wozniak-Knopp G et al., Protein Eng Des Sel 23 289-97 (2010); Gong R et al., PLoS ONE 7: e42288 (2012); Wozniak-Knopp G et al., PLoS ONE 7: e30083 (2012); Ying T et al., J Biol Chem 287: 19399-408 (2012); Ying T et al., J Biol Chem 288: 25154-64 (2013); Chiang M et al., J Am Chem Soc 136: 3370-3 (2014); Rader C, Trends Biotechnol 32: 186-97 (2014); Ying T et al., Biochimica Biophys Acta 1844: 1977-82 (2014)).

[0145] In accordance with certain other embodiments, the binding region comprises an engineered, alternative scaffold to immunoglobulin domains. Engineered alternative scaffolds are known in the art which exhibit similar functional characteristics to immunoglobulin-derived structures, such as high-affinity and specific binding of target biomolecules, and might provide improved characteristics to certain immunoglobulin domains, such as, e.g., greater stability or reduced immunogenicity. Generally, alternative scaffolds to immunoglobulins are less than 20 kilodaltons, consist of a single polypeptide chain, lack cysteine residues, and exhibit relatively high thermodynamic stability.

[0146] Any of the aforementioned PD-L1 binding molecules may be suitable for use as a PD-L1 binding region or modified to create one or more PD-L1 binding regions for use in a PD-L1 targeting molecule. Any of the above binding region structures may be used as a component of a molecule described herein as long as the binding region component has a dissociation constant of 10⁻⁵ to 10⁻¹² moles per liter, preferably less than 200 nanomolar (nM), towards an extracellular part of a PD-L1 molecule.

### B. Shiga Toxin Effector Polypeptides

[0147] The PD-L1 targeting molecules described herein may comprise at least one, Shiga toxin effector polypeptide derived from a Shiga toxin A Subunit. A Shiga toxin effector polypeptide is a polypeptide derived from a Shiga toxin A Subunit member of the Shiga toxin family that is capable of exhibiting one or more Shiga toxin functions (see e.g., Cheung M et al., Mol Cancer 9: 28 (2010); WO 2014/164680, WO 2014/164693, WO 2015/138435, WO 2015/138452, WO 2015/113005, WO 2015/113007, WO 2015/191764, WO 2016/196344, WO 2017/019623, WO 2018/106895, and WO 2018/140427). Shiga toxin functions include, e.g., increasing cellular internalization, directing subcellular routing from an endosomal compartment to the cytosol, avoiding intracellular degradation, catalytically inactivating ribosomes, and effectuating cytostatic and/or cytotoxic effects.

[0148] The Shiga toxin family of protein toxins is composed of various naturally occurring toxins which are structurally and functionally related, e.g., Shiga toxin, Shiga-like toxin 1, and Shiga-like toxin 2 (Johannes L, Römer W, Nat Rev Microbiol 8: 105-16 (2010)). Holotoxin members of the Shiga toxin family contain targeting domains that preferentially bind a specific glycosphingolipid present on the surface of some host cells and an enzymatic domain capable of permanently inactivating ribosomes once inside a cell (Johannes L, Römer W, Nat Rev Microbiol 8: 105-16 (2010)). Members of the Shiga toxin family share the same overall structure and mechanism of action (Engedal N et al., Microbial Biotech 4: 32-46 (2011)). For example, Stx, SLT-1 and SLT-2 display indistinguishable enzymatic activity in cell-free systems (Head S et al., J Biol Chem 266: 3617-21 (1991); Tesh V et al., Infect Immun 61: 3392-402 (1993); Brigotti M et al., Toxicon 35:1431-1437 (1997)).

[0149] The Shiga toxin family encompasses true Shiga toxin (Stx) isolated from S. dysenteriae serotype 1, Shiga-like toxin 1 variants (SLT1 or Stx1 or SLT-1 or Slt-I) isolated from serotypes of enterohemorrhagic E. coli, and Shiga-like toxin 2 variants (SLT2 or Stx2 or SLT-2) isolated from serotypes of enterohemorrhagic E. coli. (see e.g. Gonzalez-Escalona N, Kase J A, PLoS One 14: e0214620 (2019)). SLT1 differs by only one amino acid residue from Stx, and both have been referred to as Verocytotoxins or Verotoxins (VTs) (O'Brien A, Curr Top Microbiol Immunol 180: 65-94 (1992)). Although SLT1 and SLT2 variants are only about 53-60% similar to each other at the primary amino acid sequence level, they share mechanisms of enzymatic activity and cytotoxicity common to the members of the Shiga toxin family (Johannes L, Römer W, Nat Rev Microbiol 8: 105-16 (2010)). Over 39 different Shiga toxins have been described, such as the defined subtypes Stx1a, Stx1c, Stx1d, Stx1e, and Stx2a-g (Scheutz F et al., J Clin Microbiol 50: 2951-63 (2012); Probert W et al., J Clin Microbiol 52: 2346-51 (2014)). Members of the Shiga toxin family are not naturally restricted to any bacterial species (e.g. E. coli, S. dysenteriae, S. flexneri, S. boydii, E. cloacae, and/or S. enterica) because Shiga-toxin-encoding genes can spread among bacterial species via horizontal gene transfer (Strauch E et al., Infect Immun 69: 7588-95 (2001); Bielaszewska M et al., Appl Environ Micrbiol 73: 3144-50 (2007); Zhaxybayeva O, Doolittle W, Curr Biol 21: R242-6 (2011); Khalil R et al., Pathog Dis 74: ftw037 (2016)). As an example of interspecies transfer, a Shiga toxin was discovered in a strain of A. haemolyticus isolated from a patient (Grotiuz G et al., J Clin Microbiol 44: 3838-41 (2006)). Once a Shiga toxin encoding polynucleotide enters a new subspecies or species, the Shiga toxin amino acid sequence is presumed to be capable of developing slight sequence variations due to genetic drift and/or selective pressure while still maintaining a mechanism of cytotoxicity common to members of the Shiga toxin family (see Scheutz F et al., J Clin Microbiol 50: 2951-63 (2012)).

[0150] In some embodiments, a Shiga toxin A Subunit effector polypeptide component of the PD-L1 binding molecules described herein comprises a combination of two or more of the following Shiga toxin effector polypeptide sub-regions: (1) a de-immunized sub-region, (2) a protease-cleavage resistant sub-region near the carboxy-terminus of a Shiga toxin A1 fragment region, and (3) a T-cell epitope-peptide embedded or inserted sub-region.

### 1. De-Immunized, Shiga Toxin a Subunit Effector Polypeptides

[0151] In some embodiments, the Shiga toxin effector polypeptide of a PD-L1 targeting molecule is de-immunized, such as, e.g., as compared to a wild-type Shiga toxin, wild-type Shiga toxin polypeptide, and/or Shiga toxin effector polypeptide comprising only wild-type polypeptide sequences. A Shiga toxin effector polypeptide and/or Shiga toxin A Subunit polypeptide, whether naturally occurring or not, can be de-immunized by a method described herein, described in WO 2015/113005, WO 2015/113007, WO 2016/196344, and WO 2018/140427, and/or known to the skilled worker, wherein the resulting molecule retains one or more Shiga toxin A Subunit functions. The de-immunized, Shiga toxin effector polypeptide may comprise a disruption of at least one, putative, endogenous, epitope region in order to reduce the antigenic and/or immunogenic potential of the Shiga toxin effector polypeptide after administration of the polypeptide to a chordate.

[0152] In some embodiments, the Shiga toxin effector polypeptide comprises a disruption of an endogenous epitope or epitope region, such as, e.g., a B-cell and/or CD4+ T-cell epitope. In some embodiments, the Shiga toxin effector polypeptide comprises a disruption of at least one, endogenous, epitope region described herein, wherein the disruption reduces the antigenic and/or immunogenic potential of the Shiga toxin effector polypeptide after administration of the polypeptide to a chordate, and wherein the Shiga toxin effector polypeptide is capable of exhibiting one or more Shiga toxin A Subunit functions, such as, e.g., a significant level of Shiga toxin cytotoxicity.

[0153] The term “disrupted” or “disruption” as used herein with regard to an epitope region refers to the deletion of at least one amino acid residue in an epitope region, inversion of two or more amino acid residues where at least one of the inverted amino acid residues is in an epitope region, insertion of at least one amino acid into an epitope region, and a substitution of at least one amino acid residue in an epitope region. An epitope region disruption by mutation includes amino acid substitutions with non-standard amino acids and/or non-natural amino acids. Epitope regions may alternatively be disrupted by mutations comprising the modification of an amino acid by the addition of a covalently-linked chemical structure which masks at least one amino acid in an epitope region, see, e.g. PEGylation (see Zhang C et al., BioDrugs 26: 209-15 (2012), small molecule adjuvants (Flower D, Expert Opin Drug Discov 7: 807-17 (2012), and site-specific albumination (Lim S et al., J Control Release 207-93 (2015)).

[0154] Certain epitope regions and disruptions are indicated herein by reference to specific amino acid positions of native Shiga toxin A Subunits provided in the Sequence Listing, noting that naturally occurring Shiga toxin A Subunits may comprise precursor forms containing signal sequences of about 22 amino acids at their amino-terminals which are removed to produce mature Shiga toxin A Subunits and are recognizable to the skilled worker. Further, certain epitope region disruptions are indicated herein by reference to specific amino acids (e.g. S for a serine residue) natively present at specific positions within native Shiga toxin A Subunits (e.g. S33 for the serine residue at position 33 from the amino-terminus) followed by the amino acid with which that residue has been substituted in the particular mutation under discussion (e.g. S33I represents the amino acid substitution of isoleucine for serine at amino acid residue 33 from the amino-terminus).

[0155] In some embodiments, the de-immunized, Shiga toxin effector polypeptide comprises a disruption of at least one epitope region provided herein. In some embodiments, the de-immunized, Shiga toxin effector polypeptide comprises a disruption of at least one epitope region described in WO 2015/113005 or WO 2015/113007.

[0156] In some embodiments, the de-immunized, Shiga toxin effector polypeptide comprises or consists essentially of a full-length Shiga toxin A Subunit (e.g. SLT-1A (SEQ ID NO:1), StxA (SEQ ID NO:2), or SLT-2A (SEQ ID NO:3)) comprising at least one disruption of the amino acid sequence selected from the group of natively positioned amino acids consisting of: 1-15 of SEQ ID NO:1 or SEQ ID NO:2; 3-14 of SEQ ID NO:3; 26-37 of SEQ ID NO:3; 27-37 of SEQ ID NO:1 or SEQ ID NO:2; 39-48 of SEQ ID NO:1 or SEQ ID NO:2; 42-48 of SEQ ID NO:3; 53-66 of SEQ ID NO:1, SEQ ID NO:2, or SEQ ID NO:3; 94-115 of SEQ ID NO:1, SEQ ID NO:2, or SEQ ID NO:3; 141-153 of SEQ ID NO:1 or SEQ ID NO:2; 140-156 of SEQ ID NO:3; 179-190 of SEQ ID NO:1 or SEQ ID NO:2; 179-191 of SEQ ID NO:3; 204 of SEQ ID NO:3; 205 of SEQ ID NO:1 or SEQ ID NO:2; 210-218 of SEQ ID NO:3; 240-258 of SEQ ID NO:3; 243-257 of SEQ ID NO:1 or SEQ ID NO:2; 254-268 of SEQ ID NO:1 or SEQ ID NO:2; 262-278 of SEQ ID NO:3; 281-297 of SEQ ID NO:3; and 285-293 of SEQ ID NO:1 or SEQ ID NO:2, or the equivalent position in a Shiga toxin A Subunit polypeptide, conserved Shiga toxin effector polypeptide sub-region, and/or non-native, Shiga toxin effector polypeptide sequence.

[0157] In some embodiments, the Shiga toxin effector polypeptide comprises or consists essentially of a truncated Shiga toxin A Subunit. Truncations of Shiga toxin A Subunits might result in the deletion of an entire epitope region(s) without affecting Shiga toxin effector function(s). The smallest, Shiga toxin A Subunit fragment shown to exhibit significant enzymatic activity was a polypeptide composed of residues 75-247 of StxA (Al-Jaufy A et al., Infect Immun 62: 956-60 (1994)). Truncating the carboxy-terminus of SLT-1A, StxA, or SLT-2A to amino acids 1-251 removes two predicted B-cell epitope regions, two predicted CD4 positive (CD4+) T-cell epitopes, and a predicted, discontinuous, B-cell epitope. Truncating the amino-terminus of SLT-1A, StxA, or SLT-2A to 75-293 removes at least three, predicted, B-cell epitope regions and three predicted CD4+ T-cell epitopes. Truncating both amino- and carboxy-terminals of SLT-1A, StxA, or SLT-2A to 75-251 deletes at least five, predicted, B-cell epitope regions; four, putative, CD4+ T-cell epitopes; and one, predicted, discontinuous, B-cell epitope.

[0158] In some embodiments, a Shiga toxin effector polypeptide comprises or consists essentially of a full-length or truncated Shiga toxin A Subunit with at least one mutation, e.g. deletion, insertion, inversion, or substitution, in a provided epitope region. In some embodiments, the polypeptides comprise a disruption which comprises a deletion of at least one amino acid within the epitope region. In some embodiments, the polypeptides comprise a disruption which comprises an insertion of at least one amino acid within the epitope region. In some embodiments, the polypeptides comprise a disruption which comprises an inversion of amino acids, wherein at least one inverted amino acid is within the epitope region. In some embodiments, the polypeptides comprise a disruption which comprises a mutation, such as an amino acid substitution to a non-standard amino acid or an amino acid with a chemically modified side chain.

[0159] In some embodiments, the Shiga toxin effector polypeptides comprise or consist essentially of a full-length or truncated Shiga toxin A Subunit with one or more mutations as compared to the native sequence which comprises at least one amino acid substitution selected from the group consisting of: A, G, V, L, I, P, C, M, F, S, D, N, Q, H, and K. In some embodiments, the polypeptide comprises or consists essentially of a full-length or truncated Shiga toxin A Subunit with a single mutation as compared to the native sequence wherein the substitution is selected from the group consisting of: D to A, D to G, D to V, D to L, D to I, D to F, D to S, D to Q, E to A, E to G, E to V, E to L, E to I, E to F, E to S, E to Q, E to N, E to D, E to M, E to R, G to A, H to A, H to G, H to V, H to L, H to I, H to F, H to M, K to A, K to G, K to V, K to L, K to I, K to M, K to H, L to A, L to G, N to A, N to G, N to V, N to L, N to I, N to F, P to A, P to G, P to F, R to A, R to G, R to V, R to L, R to I, R to F, R to M, R to Q, R to S, R to K, R to H, S to A, S to G, S to V, S to L, S to I, S to F, S to M, T to A, T to G, T to V, T to L, T to I, T to F, T to M, T to S, Y to A, Y to G, Y to V, Y to L, Y to I, Y to F, and Y to M.

[0160] In some embodiments, the Shiga toxin effector polypeptides comprise or consist essentially of a full-length or truncated Shiga toxin A Subunit with one or more mutations as compared to the native amino acid residue sequence which comprises at least one amino acid substitution of an immunogenic residue and/or within an epitope region, wherein at least one substitution occurs at the natively positioned group of amino acids selected from the group consisting of: 1 of SEQ ID NO:1 or SEQ ID NO:2; 4 of SEQ ID NO:1, SEQ ID NO:2, or SEQ ID NO:3; 8 of SEQ ID NO:1, SEQ ID NO:2, or SEQ ID NO:3; 9 of SEQ ID NO:1, SEQ ID NO:2, or SEQ ID NO:3; 11 of SEQ ID NO:1, SEQ ID NO:2, or SEQ ID NO:3; 33 of SEQ ID NO:1 or SEQ ID NO:2; 43 of SEQ ID NO:1 or SEQ ID NO:2; 44 of SEQ ID NO:1 or SEQ ID NO:2; 45 of SEQ ID NO:1 or SEQ ID NO:2; 46 of SEQ ID NO:1 or SEQ ID NO:2; 47 of SEQ ID NO:1 or SEQ ID NO:2; 48 of SEQ ID NO:1, SEQ ID NO:2, or SEQ ID NO:3; 49 of SEQ ID NO:1 or SEQ ID NO:2; 50 of SEQ ID NO:1 or SEQ ID NO:2; 51 of SEQ ID NO:1 or SEQ ID NO:2; 53 of SEQ ID NO:1 or SEQ ID NO:2; 54 of SEQ ID NO:1 or SEQ ID NO:2; 55 of SEQ ID NO:1 or SEQ ID NO:2; 56 of SEQ ID NO:1 or SEQ ID NO:2; 57 of SEQ ID NO:1 or SEQ ID NO:2; 58 of SEQ ID NO:1, SEQ ID NO:2, or SEQ ID NO:3; 59 of SEQ ID NO:1, SEQ ID NO:2, or SEQ ID NO:3; 60 of SEQ ID NO:1 or SEQ ID NO:2; 61 of SEQ ID NO:1 or SEQ ID NO:2; 62 of SEQ ID NO:1 or SEQ ID NO:2; 84 of SEQ ID NO:1 or SEQ ID NO:2; 88 of SEQ ID NO:1 or SEQ ID NO:2; 94 of SEQ ID NO:1, SEQ ID NO:2, or SEQ ID NO:3; 96 of SEQ ID NO:1, SEQ ID NO:2, or SEQ ID NO:3; 104 of SEQ ID NO:1 or SEQ ID NO:2; 105 of SEQ ID NO:1 or SEQ ID NO:2; 107 of SEQ ID NO:1 or SEQ ID NO:2; 108 of SEQ ID NO:1 or SEQ ID NO:2; 109 of SEQ ID NO:1, SEQ ID NO:2, or SEQ ID NO:3; 110 of SEQ ID NO:1 or SEQ ID NO:2; 111 of SEQ ID NO:1 or SEQ ID NO:2; 112 of SEQ ID NO:1, SEQ ID NO:2, or SEQ ID NO:3; 141 of SEQ ID NO:1 or SEQ ID NO:2; 147 of SEQ ID NO:1, SEQ ID NO:2, or SEQ ID NO:3; 154 of SEQ ID NO:1 or SEQ ID NO:2; 179 of SEQ ID NO:1, SEQ ID NO:2, or SEQ ID NO:3; 180 of SEQ ID NO:1 or SEQ ID NO:2; 181 of SEQ ID NO:1 or SEQ ID NO:2; 183 of SEQ ID NO:1, SEQ ID NO:2, or SEQ ID NO:3; 184 of SEQ ID NO:1, SEQ ID NO:2, or SEQ ID NO:3; 185 of SEQ ID NO:1 or SEQ ID NO:2; 186 of SEQ ID NO:1, SEQ ID NO:2, or SEQ ID NO:3; 187 of SEQ ID NO:1 or SEQ ID NO:2; 188 of SEQ ID NO:1 or SEQ ID NO:2; 189 of SEQ ID NO:1 or SEQ ID NO:2; 198 of SEQ ID NO:1 or SEQ ID NO:2; 204 of SEQ ID NO:3; 205 of SEQ ID NO:1 or SEQ ID NO:2; 241 of SEQ ID NO:3; 242 of SEQ ID NO:1 or SEQ ID NO:2; 247 of SEQ ID NO:1 or SEQ ID NO:2; 247 of SEQ ID NO:3; 248 of SEQ ID NO:1 or SEQ ID NO:2; 250 of SEQ ID NO:3; 251 of SEQ ID NO:1 or SEQ ID NO:2; 264 of SEQ ID NO:1, SEQ ID NO:2, or SEQ ID NO:3; 265 of SEQ ID NO:1 or SEQ ID NO:2; and 286 of SEQ ID NO:1 or SEQ ID NO:2.

[0161] In some embodiments, the Shiga toxin effector polypeptides comprise or consist essentially of a full-length or truncated Shiga toxin A Subunit with at least one substitution of an immunogenic residue and/or within an epitope region, wherein at least one amino acid substitution is to a non-conservative amino acid (see, e.g., Table 3, infra) relative to a natively occurring amino acid positioned at one of the following native positions: 1 of SEQ ID NO:1 or SEQ ID NO:2; 4 of SEQ ID NO:1, SEQ ID NO:2, or SEQ ID NO:3; 8 of SEQ ID NO:1, SEQ ID NO:2, or SEQ ID NO:3; 9 of SEQ ID NO:1, SEQ ID NO:2, or SEQ ID NO:3; 11 of SEQ ID NO:1, SEQ ID NO:2, or SEQ ID NO:3; 33 of SEQ ID NO:1 or SEQ ID NO:2; 43 of SEQ ID NO:1 or SEQ ID NO:2; 44 of SEQ ID NO:1 or SEQ ID NO:2; 45 of SEQ ID NO:1 or SEQ ID NO:2; 46 of SEQ ID NO:1 or SEQ ID NO:2; 47 of SEQ ID NO:1 or SEQ ID NO:2; 48 of SEQ ID NO:1, SEQ ID NO:2, or SEQ ID NO:3; 49 of SEQ ID NO:1 or SEQ ID NO:2; 50 of SEQ ID NO:1 or SEQ ID NO:2; 51 of SEQ ID NO:1 or SEQ ID NO:2; 53 of SEQ ID NO:1 or SEQ ID NO:2; 54 of SEQ ID NO:1 or SEQ ID NO:2; 55 of SEQ ID NO:1 or SEQ ID NO:2; 56 of SEQ ID NO:1 or SEQ ID NO:2; 57 of SEQ ID NO:1 or SEQ ID NO:2; 58 of SEQ ID NO:1, SEQ ID NO:2, or SEQ ID NO:3; 59 of SEQ ID NO:1, SEQ ID NO:2, or SEQ ID NO:3; 60 of SEQ ID NO:1 or SEQ ID NO:2; 61 of SEQ ID NO:1 or SEQ ID NO:2; 62 of SEQ ID NO:1 or SEQ ID NO:2; 84 of SEQ ID NO:1 or SEQ ID NO:2; 88 of SEQ ID NO:1 or SEQ ID NO:2; 94 of SEQ ID NO:1, SEQ ID NO:2, or SEQ ID NO:3; 96 of SEQ ID NO:1, SEQ ID NO:2, or SEQ ID NO:3; 104 of SEQ ID NO:1 or SEQ ID NO:2; 105 of SEQ ID NO:1 or SEQ ID NO:2; 107 of SEQ ID NO:1 or SEQ ID NO:2; 108 of SEQ ID NO:1 or SEQ ID NO:2; 109 of SEQ ID NO:1, SEQ ID NO:2, or SEQ ID NO:3; 110 of SEQ ID NO:1 or SEQ ID NO:2; 111 of SEQ ID NO:1 or SEQ ID NO:2; 112 of SEQ ID NO:1, SEQ ID NO:2, or SEQ ID NO:3; 141 of SEQ ID NO:1 or SEQ ID NO:2; 147 of SEQ ID NO:1, SEQ ID NO:2, or SEQ ID NO:3; 154 of SEQ ID NO:1 or SEQ ID NO:2; 179 of SEQ ID NO:1, SEQ ID NO:2, or SEQ ID NO:3; 180 of SEQ ID NO:1 or SEQ ID NO:2; 181 of SEQ ID NO:1 or SEQ ID NO:2; 183 of SEQ ID NO:1, SEQ ID NO:2, or SEQ ID NO:3; 184 of SEQ ID NO:1, SEQ ID NO:2, or SEQ ID NO:3; 185 of SEQ ID NO:1 or SEQ ID NO:2; 186 of SEQ ID NO:1, SEQ ID NO:2, or SEQ ID NO:3; 187 of SEQ ID NO:1 or SEQ ID NO:2; 188 of SEQ ID NO:1 or SEQ ID NO:2; 189 of SEQ ID NO:1 or SEQ ID NO:2; 198 of SEQ ID NO:1 or SEQ ID NO:2; 204 of SEQ ID NO:3; 205 of SEQ ID NO:1 or SEQ ID NO:2; 241 of SEQ ID NO:3; 242 of SEQ ID NO:1 or SEQ ID NO:2; 247 of SEQ ID NO:1 or SEQ ID NO:2; 247 of SEQ ID NO:3; 248 of SEQ ID NO:1 or SEQ ID NO:2; 250 of SEQ ID NO:3; 251 of SEQ ID NO:1 or SEQ ID NO:2; 264 of SEQ ID NO:1, SEQ ID NO:2, or SEQ ID NO:3; 265 of SEQ ID NO:1 or SEQ ID NO:2; and 286 of SEQ ID NO:1 or SEQ ID NO:2.

[0162] In some embodiments, the Shiga toxin effector polypeptides comprise or consist essentially of a full-length or truncated Shiga toxin A Subunit with at least one amino acid substitution selected from the group consisting of: K1 to A, G, V, L, I, F, M and H; T4 to A, G, V, L, I, F, M, and S; D6 to A, G, V, L, I, F, S, and Q; S8 to A, G, V, I, L, F, and M; T8 to A, G, V, I, L, F, M, and S; T9 to A, G, V, I, L, F, M, and S; S9 to A, G, V, L, I, F, and M; K11 to A, G, V, L, I, F, M and H; T12 to A, G, V, I, L, F, M, and S; S33 to A, G, V, L, I, F, and M; S43 to A, G, V, L, I, F, and M; G44 to A and L; S45 to A, G, V, L, I, F, and M; T45 to A, G, V, L, I, F, and M; G46 to A and P; D47 to A, G, V, L, I, F, S, and Q; N48 to A, G, V, L, and M; L49 to A or G; F50; A51 to V; D53 to A, G, V, L, I, F, S, and Q; V54 to A, G, and L; R55 to A, G, V, L, I, F, M, Q, S, K, and H; G56 to A and P; 157 to A, G, M, and F; L57 to A, G, M, and F; D58 to A, G, V, L, I, F, S, and Q; P59 to A, G, and F; E60 to A, G, V, L, I, F, S, Q, N, D, M, and R; E61 to A, G, V, L, I, F, S, Q, N, D, M, and R; G62 to A; D94 to A, G, V, L, I, F, S, and Q; R84 to A, G, V, L, I, F, M, Q, S, K, and H; V88 to A and G; I88 to A, G, and V; D94; S96 to A, G, V, I, L, F, and M; T104 to A, G, V, I, L, F, M, and S; A105 to L; T107 to A, G, V, I, L, F, M, and S; S107 to A, G, V, L, I, F, and M; L108 to A, G, and M; S109 to A, G, V, I, L, F, and M; T109 to A, G, V, I, L, F, M, and S; G110 to A; D111 to A, G, V, L, I, F, S, and Q; S112 to A, G, V, L, I, F, and M; D141 to A, G, V, L, I, F, S, and Q; G147 to A; V154 to A and G; R179 to A, G, V, L, I, F, M, Q, S, K, and H; T180 to A, G, V, L, I, F, M, and S; T181 to A, G, V, L, I, F, M, and S; D183 to A, G, V, L, I, F, S, and Q; D184 to A, G, V, L, I, F, S, and Q; L185 to A, G, and V; S186 to A, G, V, I, L, F, and M; G187 to A; R188 to A, G, V, L, I, F, M, Q, S, K, and H; S189 to A, G, V, I, L, F, and M; D197 to A, G, V, L, I, F, S, and Q; D198 to A, G, V, L, I, F, S, and Q; R204 to A, G, V, L, I, F, M, Q, S, K, and H; R205 to A, G, V, L, I, F, M, Q, S, K and H; C242 to A, G, V, and S; S247 to A, G, V, I, L, F, and M; Y247 to A, G, V, L, I, F, and M; R248 to A, G, V, L, I, F, M, Q, S, K, and H; R250 to A, G, V, L, I, F, M, Q, S, K, and H; R251 to A, G, V, L, I, F, M, Q, S, K, and H; C262 to A, G, V, and S; D264 to A, G, V, L, I, F, S, and Q; G264 to A; and T286 to A, G, V, L, I, F, M, and S.

[0163] In some embodiments, the Shiga toxin effector polypeptides comprise or consist essentially of a full-length or truncated Shiga toxin A Subunit with at least one of the following amino acid substitutions K1A, K1M, T4I, D6R, S8I, T8V, T9I, S9I, K11A, K11H, T12K, S33I, S33C, S43N, G44L, S45V, S45I, T45V, T45I, G46P, D47M, D47G, N48V, N48F, L49A, F50T, A51V, D53A, D53N, D53G, V54L, V54I, R55A, R55V, R55L, G56P, I57F, I57M, D58A, D58V, D58F, P59A, P59F, E60I, E60T, E60R, E61A, E61V, E61L, G62A, R84A, V88A, D94A, S96I, T104N, A105L, T107P, L108M, S109V, T109V, G110A, D111T, S112V, D141A, G147A, V154A, R179A, T180G, T181I, D183A, D183G, D184A, D184A, D184F, L185V, L185D, S186A, S186F, G187A, G187T, R188A, R188L, S189A, D198A, R204A, R205A, C242S, S247I, Y247A, R248A, R250A, R251A, or D264A, G264A, T286A, and/or T286I, wherein the amino acid numbering is relative to any one of SEQ ID NOs: 1-3. These epitope disrupting substitutions may be combined to form a de-immunized, Shiga toxin effector polypeptide with multiple substitutions per epitope region and/or multiple epitope regions disrupted while still retaining Shiga toxin effector function. For example, substitutions at the natively positioned K1A, K1M, T4I, D6R, S8I, T8V, T9I, S9I, K11A, K11H, T12K, S33I, S33C, S43N, G44L, S45V, S45I, T45V, T45I, G46P, D47M, D47G, N48V, N48F, L49A, F50T, A51V, D53A, D53N, D53G, V54L, V54I, R55A, R55V, R55L, G56P, I57F, I57M, D58A, D58V, D58F, P59A, P59F, E60I, E60T, E60R, E61A, E61V, E61L, G62A, R84A, V88A, D94A, S96I, T104N, A105L, T107P, L108M, S109V, T109V, G110A, D111T, S112V, D141A, G147A, V154A, R179A, T180G, T181I, D183A, D183G, D184A, D184A, D184F, L185V, L185D, S186A, S186F, G187A, G187T, R188A, R188L, S189A, D198A, R204A, R205A, C242S, S247I, Y247A, R248A, R250A, R251A, or D264A, G264A, T286A, and/or T286I may be combined, where possible, with substitutions at the natively positioned residues K1A, K1M, T4I, D6R, S8I, T8V, T9I, S9I, K11A, K11H, T12K, S33I, S33C, S43N, G44L, S45V, S45I, T45V, T45I, G46P, D47M, D47G, N48V, N48F, L49A, F50T, A51V, D53A, D53N, D53G, V54L, V54I, R55A, R55V, R55L, G56P, I57F, I57M, D58A, D58V, D58F, P59A, P59F, E60I, E60T, E60R, E61A, E61V, E61L, G62A, R84A, V88A, D94A, S96I, T104N, A105L, T107P, L108M, S109V, T109V, G110A, D111T, S112V, D141A, G147A, V154A, R179A, T180G, T181I, D183A, D183G, D184A, D184A, D184F, L185V, L185D, S186A, S186F, G187A, G187T, R188A, R188L, S189A, D198A, R204A, R205A, C242S, S247I, Y247A, R248A, R250A, R251A, or D264A, G264A, T286A, and/or T286I to create de-immunized, Shiga toxin effector polypeptides.

[0164] Any of the de-immunized, Shiga toxin effector polypeptide sub-regions and/or epitope disrupting mutations described herein may be used alone or in combination with each individual embodiment described herein, including methods.

### 2. Protease-Cleavage Resistant, Shiga Toxin A Subunit Effector Polypeptides

[0165] In some embodiments, the Shiga toxin effector polypeptide of the PD-L1 targeting molecule comprises (1) a Shiga toxin A1 fragment derived region having a carboxy-terminus and (2) a disrupted furin-cleavage site at the carboxy-terminus of the Shiga toxin A1 fragment region. Improving the stability of connections between the Shiga toxin component and other components of PD-L1 targeting molecules, e.g., cell-targeting binding regions, can improve their toxicity profiles after administration to organisms by reducing non-specific toxicities caused by the breakdown of the connection and loss of cell-targeting, such as, e.g., as a result of proteolysis.

[0166] Shiga toxin A Subunits of members of the Shiga toxin family comprise a conserved, furin-cleavage site at the carboxy-terminal of their A1 fragment regions important for Shiga toxin function. Furin-cleavage site sites and furin-cleavage sites can be identified by the skilled worker using standard techniques and/or by using the information herein.

[0167] The model of Shiga toxin cytotoxicity is that intracellular proteolytic processing of Shiga toxin A Subunits by furin in intoxicated cells is essential for 1) liberation of the A1 fragment from the rest of the Shiga holotoxin, 2) escape of the A1 fragment from the endoplasmic reticulum by exposing a hydrophobic domain in the carboxy-terminus of the A1 fragment, and 3) enzymatic activation of the A1 fragment (see Johannes L, Römer W, Nat Rev Microbiol 8: 105-16 (2010)). The efficient liberation of the Shiga toxin A1 fragment from the A2 fragment and the rest of the components of the Shiga holotoxin in the endoplasmic reticulum of intoxicated cells is essential for efficient intracellular routing to the cytosol, maximal enzymatic activity, efficient ribosome inactivation, and achieving optimal cytotoxicity, i.e. comparable to a wild-type Shiga toxin (see e.g. WO 2015/191764 and references therein).

[0168] During Shiga toxin intoxication, the A Subunit is proteolytically cleaved by furin at the carboxy bond of a conserved arginine residue (e.g. the arginine residue at position 251 in StxA and SLT-1A and the arginine residue at position 250 in Stx2A and SLT-2A). Furin cleavage of Shiga toxin A Subunits occurs in endosomal and/or Golgi compartments. Furin is a specialized serine endoprotease which is expressed by a wide variety of cell types, in all human tissues examined, and by most animal cells. Furin cleaves polypeptides comprising accessible sites often centered on the minimal, dibasic, consensus site R-x-(R/K/x)-R (SEQ ID NO: 161). The A Subunits of members of the Shiga toxin family comprise a conserved, surface-exposed, extended loop structure (e.g. 242-261 in StxA and SLT-1A, and 241-260 in SLT-2) with a conserved S-R/Y-x-x-R site (SEQ ID NO: 162) which is cleaved by furin. The surface exposed, extended loop structure positioned at amino acid residues 242-261 in StxA is required for furin-induced cleavage of StxA, including features flanking the minimal, furin-cleavage site R-x-x-R (SEQ ID NO: 160).

[0169] Furin-cleavage sites and furin-cleavage sites in Shiga toxin A Subunits and Shiga toxin effector polypeptides can be identified by the skilled worker using standard methods and/or by using the information herein. Furin cleaves the minimal, consensus site R-x-x-R (SEQ ID NO: 160) (Schalken J et al., J Clin Invest 80: 1545-9 (1987); Bresnahan P et al., J Cell Biol 111: 2851-9 (1990); Hatsuzawa K et al., J Biol Chem 265: 22075-8 (1990); Wise R et al., Proc Natl Acad Sci USA 87: 9378-82 (1990); Molloy S et al., J Biol Chem 267: 16396-402 (1992)). Consistent with this, many furin inhibitors comprise peptides comprising the site R-x-x-R (SEQ ID NO: 160). An example of a synthetic inhibitor of furin is a molecule comprising the peptide R-V-K-R (SEQ ID NO: 163) (Henrich S et al., Nat Struct Biol 10: 520-6 (2003)). In general, a peptide or protein comprising a surface accessible, dibasic amino acid site with two positively charged, amino acids separated by two amino acid residues can be predicted to be sensitive to furin-cleavage with cleavage occurring at the carboxy bond of the last basic amino acid in the site.

[0170] Consensus sites in substrates cleaved by furin have been identified with some degree of specificity. A furin-cleavage site site has been described that comprises a region of twenty, continuous, amino acid residues, which can be labeled P14 through P6′ (Tian S et al., Int J Mol Sci 12: 1060-5 (2011)) using the nomenclature described in Schechter I, Berger, A, Biochem Biophys Res Commun 32: 898-902 (1968). According to this nomenclature, the furin-cleavage site is at the carboxy bond of the amino acid residue designated P1, and the amino acid residues of the furin-cleavage site are numbered P2, P3, P4, etc., in the direction going toward the amino-terminus from this reference P1 residue. The amino acid residues of the site going toward the carboxy-terminus from the P1 reference residue are numbered with the prime notation P2′, P3′, P4′, etc. Using this nomenclature, the P6 to P2′ region delineates the core substrate of the furin cleavage site which is bound by the enzymatic domain of furin. The two flanking regions P14 to P7 and P3′ to P6′ are often rich in polar, amino acid residues to increase the accessibility to the core furin cleavage site located between them.

[0171] A general, furin-cleavage site is often described by the consensus sequence R-x-x-R (SEQ ID NO: 160) which corresponds to P4-P3-P2-P1; where “R” represents an arginine residue (see Table 1, supra), a dash “-” represents a peptide bond, and a lowercase “x” represents any amino acid residue. However, other residues and positions may help to further define furin-cleavage sites. A slightly more refined furin-cleavage site, consensus site is often reported as the consensus sequence R-x-[K/R]-R (SEQ ID NO: 164) (where a forward slash “/” means “or” and divides alternative amino acid residues at the same position), which corresponds to P4-P3-P2-P1, because it was observed that furin has a strong preference for cleaving substrates containing this site.

[0172] In addition to the minimal, furin-cleavage site R-x-x-R (SEQ ID NO: 160), a larger, furin-cleavage site has been described with certain amino acid residue preferences at certain positions. By comparing various known furin substrates, certain physicochemical properties have been characterized for the amino acid residues in a 20 amino acid residue long, furin-cleavage site site. The P6 to P2′ region of the furin-cleavage site delineates the core furin-cleavage site which physically interacts with the enzymatic domain of furin. The two flanking regions P14 to P7 and P3′ to P6′ are often hydrophilic being rich in polar, amino acid residues to increase the surface accessibility of the core furin-cleavage site located between them.

[0173] In general, the furin-cleavage site from position P5 to P1 tends to comprise amino acid residues with a positive charge and/or high isoelectric points. In particular, the P1 position, which marks the position of furin proteolysis, is generally occupied by an arginine but other positively charged, amino acid residues can occur in this position. Positions P2 and P3 tend to be occupied by flexible, amino acid residues, and in particular P2 tends to be occupied by arginine, lysine, or sometimes by very small and flexible amino acid residues like glycine. The P4 position tends to be occupied by positively charged, amino acid residues in furin substrates. However, if the P4 position is occupied by an aliphatic, amino acid residue, then the lack of a positively charged, functional group can be compensated for by a positively charged residue located at position(s) P5 and/or P6. Positions P1′ and P2′ are commonly occupied by aliphatic and/or hydrophobic amino acid residues, with the P1′ position most commonly being occupied by a serine.

[0174] The two, hydrophilic, flanking regions tend to be occupied by amino acid residues which are polar, hydrophilic, and have smaller amino acid functional groups; however, in certain verified furin substrates, the flanking regions do not contain any hydrophilic, amino acid residues (see Tian S, Biochem Insights 2: 9-20 (2009)).

[0175] The twenty amino acid residue, furin-cleavage site found in native, Shiga toxin A Subunits at the junction between the Shiga toxin A1 fragment and A2 fragment is well characterized in certain Shiga toxins. For example in StxA (SEQ ID NO:2) and SLT-1A (SEQ ID NO:1), this furin-cleavage site is natively positioned from L238 to F257, and in SLT-2A (SEQ ID NO:3), this furin-cleavage site is natively positioned from V237 to Q256. Based on amino acid homology, experiment, and/or furin-cleavage assays described herein, the skilled worker can identify furin-cleavage sites in other native, Shiga toxin A Subunits or Shiga toxin effector polypeptides, where the sites are actual furin-cleavage sites or are predicted to result in the production of A1 and A2 fragments after furin cleavage of those molecules within a eukaryotic cell.

[0176] In some embodiments, the Shiga toxin effector polypeptide comprises (1) a Shiga toxin A1 fragment derived polypeptide having a carboxy-terminus and (2) a disrupted furin-cleavage site at the carboxy-terminus of the Shiga toxin A1 fragment derived polypeptide. The carboxy-terminus of a Shiga toxin A1 fragment derived polypeptide may be identified by the skilled worker by using techniques known in the art, such as, e.g., by using protein sequence alignment software to identify (i) a furin-cleavage site conserved with a naturally occurring Shiga toxin, (ii) a surface exposed, extended loop conserved with a naturally occurring Shiga toxin, and/or (iii) a stretch of amino acid residues which are predominantly hydrophobic (i.e. a hydrophobic “patch”) that may be recognized by the ERAD system.

[0177] A protease-cleavage resistant, Shiga toxin effector polypeptide of the PD-L1 targeting molecule (1) may be completely lacking any furin-cleavage site at a carboxy-terminus of its Shiga toxin A1 fragment region and/or (2) comprise a disrupted furin-cleavage site at the carboxy-terminus of its Shiga toxin A1 fragment region and/or region derived from the carboxy-terminus of a Shiga toxin A1 fragment. A disruption of a furin-cleavage site include various alterations to an amino acid residue in the furin-cleavage site, such as, e.g., a post-translation modification(s), an alteration of one or more atoms in an amino acid functional group, the addition of one or more atoms to an amino acid functional group, the association to a non-proteinaceous moiety(ies), and/or the linkage to an amino acid residue, peptide, polypeptide such as resulting in a branched proteinaceous structure.

[0178] Protease-cleavage resistant, Shiga toxin effector polypeptides may be created from a Shiga toxin effector polypeptide and/or Shiga toxin A Subunit polypeptide, whether naturally occurring or not, using a method described herein, described in WO 2015/191764, and/or known to the skilled worker, wherein the resulting molecule still retains one or more Shiga toxin A Subunit functions.

[0179] As used herein with regard to a furin-cleavage site, the term “disruption” or “disrupted” refers to an alteration from the naturally occurring furin-cleavage site, such as, e.g., a mutation, that results in a reduction in furin-cleavage proximal to the carboxy-terminus of a Shiga toxin A1 fragment region, or identifiable region derived thereof, as compared to the furin-cleavage of a wild-type Shiga toxin A Subunit or a polypeptide derived from a wild-type Shiga toxin A Subunit comprising only wild-type polypeptide sequences. An alteration to an amino acid residue in the furin-cleavage site includes a mutation in the furin-cleavage site, such as, e.g., a deletion, insertion, inversion, substitution, and/or carboxy-terminal truncation of the furin-cleavage site, as well as a post-translation modification, such as, e.g., as a result of glycosylation, albumination, and the like which involve conjugating or linking a molecule to the functional group of an amino acid residue. Because the furin-cleavage site is comprised of about twenty, amino acid residues, in theory, alterations, modifications, mutations, deletions, insertions, and/or truncations involving one or more amino acid residues of any one of these twenty positions might result in a reduction of furin-cleavage sensitivity (Tian S et al., Sci Rep 2: 261 (2012)). The disruption of a furin-cleavage site furin-cleavage sitemight or might not increase resistance to cleavage by other proteases, such as, e.g., trypsin and extracellular proteases common in the vascular system of mammals. The effects of a given disruption to cleavage sensitivity of a given protease may be tested by the skilled worker using techniques known in the art.

[0180] As used herein, a “disrupted furin-cleavage site” is furin-cleavage site comprising an alteration to one or more amino acid residues derived from the 20 amino acid residue region representing a conserved, furin-cleavage site found in native, Shiga toxin A Subunits at the junction between the Shiga toxin A1 fragment and A2 fragment regions and positioned such that furin cleavage of a Shiga toxin A Subunit results in the production of the A1 and A2 fragments; wherein the disrupted furin-cleavage site exhibits reduced furin cleavage in an experimentally reproducible way as compared to a reference molecule comprising a wild-type, Shiga toxin A1 fragment region fused to a carboxy-terminal polypeptide of a size large enough to monitor furin cleavage using the appropriate assay known to the skilled worker and/or described herein.

[0181] Examples of types of mutations which can disrupt a furin-cleavage site furin-cleavage site are amino acid residue deletions, insertions, truncations, inversions, and/or substitutions, including substitutions with non-standard amino acids and/or non-natural amino acids. In addition, furin-cleavage sites furin-cleavage site can be disrupted by mutations comprising the modification of an amino acid by the addition of a covalently-linked structure which masks at least one amino acid in the site or site, such as, e.g., as a result of PEGylation, the coupling of small molecule adjuvants, and/or site-specific albumination.

[0182] If a furin-cleavage site has been disrupted by mutation and/or the presence of non-natural amino acid residues, certain disrupted furin-cleavage sites may not be easily recognizable as being related to any furin-cleavage site; however, the carboxy-terminus of the Shiga toxin A1 fragment derived region will be recognizable and will define where the furin-cleavage site would be located were it not disrupted. For example, a disrupted furin-cleavage site may comprise less than the twenty, amino acid residues of the furin-cleavage site due to a carboxy-terminal truncation as compared to a Shiga toxin A Subunit and/or Shiga toxin A1 fragment.

[0183] In some embodiments, the Shiga toxin effector polypeptide comprises (1) a Shiga toxin A1 fragment derived polypeptide having a carboxy-terminus and (2) a disrupted furin-cleavage site at the carboxy-terminus of the Shiga toxin A1 fragment polypeptide region; wherein the Shiga toxin effector polypeptide (and any PD-L1 targeting molecule comprising it) is more furin-cleavage resistant as compared to a reference molecule, such as, e.g., a wild-type Shiga toxin polypeptide comprising the carboxy-terminus of an A1 fragment and/or the conserved, furin-cleavage site between A1 and A2 fragments. For example, a reduction in furin cleavage of one molecule compared to a reference molecule may be determined using an in vitro, furin-cleavage assay described in WO 2015/191764, conducted using the same conditions, and then performing a quantitation of the band density of any fragments resulting from cleavage to quantitatively measure in change in furin cleavage.

[0184] In some embodiments, the Shiga toxin effector polypeptide is more resistant to furin-cleavage in vitro and/or in vivo as compared to a wild-type, Shiga toxin A Subunit.

[0185] In general, the protease-cleavage sensitivity of a PD-L1 targeting molecule is tested by comparing it to the same molecule having its furin-cleavage resistant, Shiga toxin effector polypeptide replaced with a wild-type, Shiga toxin effector polypeptide comprising a Shiga toxin A1 fragment. In some embodiments, the molecules comprising a disrupted furin-cleavage site exhibits a reduction in in vitro furin cleavage of 30%, 40%, 50%, 60%, 70%, 80%, 90%, 95%, 97%, 98% or greater compared to a reference molecule comprising a wild-type, Shiga toxin A1 fragment fused at its carboxy-terminus to a peptide or polypeptide.

[0186] Several furin-cleavage site disruptions have been described. For example, mutating the two conserved arginines to alanines in the minimal R-x-x-R site (SEQ ID NO: 160) completely blocked processing by furin and/or furin-like proteases (see e.g Duda A et al., J Virology 78: 13865-70 (2004)). Because the furin-cleavage site site comprises about twenty amino acid residues, in theory, certain mutations involving one or more of any one of these twenty, amino acid residue positions might abolish furin cleavage or reduce furin cleavage efficiency (see e.g. Tian S et al., Sci Rep 2: 261 (2012)).

[0187] In some embodiments, the molecules comprise a Shiga toxin effector polypeptide derived from at least one A Subunit of a member of the Shiga toxin family wherein the Shiga toxin effector polypeptide comprises a disruption in one or more amino acids derived from the conserved, highly accessible, protease-cleavage sensitive loop of Shiga toxin A Subunits. For example, in StxA and SLT-1A, this highly accessible, protease-sensitive loop is natively positioned from amino acid residues 242 to 261, and in SLT-2A, this conserved loop is natively positioned from amino acid residues 241 to 260. Based on polypeptide sequence homology, the skilled worker can identify this conserved, highly accessible loop structure in other Shiga toxin A Subunits. Certain mutations to the amino acid residues in this loop can reduce the accessibility of certain amino acid residues within the loop to proteolytic cleavage and this might reduce furin-cleavage sensitivity.

[0188] In some embodiments, a molecule described herein comprises a Shiga toxin effector polypeptide comprising a disrupted furin-cleavage site comprising a mutation in the surface-exposed, protease sensitive loop conserved among Shiga toxin A Subunits. In some embodiments, a molecule comprises a Shiga toxin effector polypeptide comprising a disrupted furin-cleavage site comprising a mutation in this protease-sensitive loop of Shiga toxin A Subunits, the mutation which reduce the surface accessibility of certain amino acid residues within the loop such that furin-cleavage sensitivity is reduced.

[0189] In some embodiments, the disrupted furin-cleavage site of a Shiga toxin effector polypeptide comprises a disruption in terms of existence, position, or functional group of one or both of the consensus amino acid residues P1 and P4, such as, e.g., the amino acid residues in positions 1 and 4 of the minimal furin-cleavage site R/Y-x-x-R (SEQ ID NO: 159). For example, mutating one or both of the two arginine residues in the minimal, furin consensus site R-x-x-R (SEQ ID NO: 160) to alanine will disrupt a furin-cleavage site and prevent furin-cleavage at that site. Similarly, amino acid residue substitutions of one or both of the arginine residues in the minimal furin-cleavage site R-x-x-R (SEQ ID NO: 160) to any non-conservative amino acid residue known to the skilled worker will reduced the furin-cleavage sensitivity of the site. In particular, amino acid residue substitutions of arginine to any non-basic amino acid residue which lacks a positive charge, such as, e.g., A, G, P, S, T, D, E, Q, N, C, I, L, M, V, F, W, and Y, will result in a disrupted furin-cleavage site.

[0190] In some embodiments, the disrupted furin-cleavage site of a Shiga toxin effector polypeptide comprises a disruption in the spacing between the consensus amino acid residues P4 and P1 in terms of the number of intervening amino acid residues being other than two, and, thus, changing either P4 and/or P1 into a different position and eliminating the P4 and/or P1 designations. For example, deletions within the furin-cleavage site of the minimal furin-cleavage site or the core, furin-cleavage site will reduce the furin-cleavage sensitivity of the furin-cleavage site.

[0191] In some embodiments, the disrupted furin-cleavage site comprises one or more amino acid residue substitutions, as compared to a wild-type, Shiga toxin A Subunit. In some embodiments, the disrupted furin-cleavage site comprises one or more amino acid residue substitutions within the minimal furin-cleavage site R/Y-x-x-R (SEQ ID NO: 159), such as, e.g., for StxA and SLT-1A derived Shiga toxin effector polypeptides, the natively positioned amino acid residue R248 substituted with any non-positively charged, amino acid residue and/or R251 substituted with any non-positively charged, amino acid residue; and for SLT-2A derived Shiga toxin effector polypeptides, the natively positioned amino acid residue Y247 substituted with any non-positively charged, amino acid residue and/or R250 substituted with any non-positively charged, amino acid residue.

[0192] In some embodiments, the disrupted furin-cleavage site comprises an un-disrupted, minimal furin-cleavage site R/Y-x-x-R (SEQ ID NO: 159) but instead comprises a disrupted flanking region, such as, e.g., amino acid residue substitutions in one or more amino acid residues in the furin-cleavage site flanking regions natively position at, e.g., 241-247 and/or 252-259. In some embodiments, the disrupted furin cleavage site comprises a substitution of one or more of the amino acid residues located in the P1-P6 region of the furin-cleavage site; mutating P1′ to a bulky amino acid, such as, e.g., R, W, Y, F, and H; and mutating P2′ to a polar and hydrophilic amino acid residue; and substituting one or more of the amino acid residues located in the P1′-P6′ region of the furin-cleavage site with one or more bulky and hydrophobic amino acid residues

[0193] In some embodiments, the disruption of the furin-cleavage site comprises a deletion, insertion, inversion, and/or mutation of at least one amino acid residue within the furin-cleavage site. In some embodiments, a protease-cleavage resistant, Shiga toxin effector polypeptide comprises a disruption of the amino acid sequence natively positioned at 249-251 of the A Subunit of Shiga-like toxin 1 (SEQ ID NO:1) or Shiga toxin (SEQ ID NO:2), or at 247-250 of the A Subunit of Shiga-like toxin 2 (SEQ ID NO:3) or the equivalent position in a conserved Shiga toxin effector polypeptide and/or non-native Shiga toxin effector polypeptide sequence. In some embodiments, protease-cleavage resistant, Shiga toxin effector polypeptides comprise a disruption which comprises a deletion of at least one amino acid within the furin-cleavage site. In some embodiments, protease-cleavage resistant, Shiga toxin effector polypeptides comprise a disruption which comprises an insertion of at least one amino acid within the protease-cleavage site. In some embodiments, the protease-cleavage resistant, Shiga toxin effector polypeptides comprise a disruption which comprises an inversion of amino acids, wherein at least one inverted amino acid is within the protease site. In some embodiments, the protease-cleavage resistant, Shiga toxin effector polypeptides comprise a disruption which comprises a mutation, such as an amino acid substitution to a non-standard amino acid or an amino acid with a chemically modified side chain.

[0194] In some embodiments, the disrupted furin-cleavage site comprises the deletion of nine, ten, eleven, or more of the carboxy-terminal amino acid residues within the furin-cleavage site. In these embodiments, the disrupted furin-cleavage site will not comprise a minimal furin-cleavage site. In other words, some embodiments lack a furin-cleavage site at the carboxy-terminus of the A1 fragment region.

[0195] In some embodiments, the disrupted furin-cleavage site comprises both an amino acid residue deletion and an amino acid residue substitution as compared to a wild-type, Shiga toxin A Subunit. In some embodiments, the disrupted furin-cleavage site comprises one or more amino acid residue deletions and substitutions within the minimal furin-cleavage site R/Y-x-x-R (SEQ ID NO: 159), such as, e.g., for StxA and SLT-1A derived Shiga toxin effector polypeptides, the natively positioned amino acid residue R248 substituted with any non-positively charged, amino acid residue and/or R251 substituted with any non-positively charged, amino acid residue; and for SLT-2A derived Shiga toxin effector polypeptides, the natively positioned amino acid residue Y247 substituted with any non-positively charged, amino acid residue and/or R250 substituted with any non-positively charged, amino acid residue.

[0196] In some embodiments, the disrupted furin-cleavage site comprises an amino acid residue deletion and an amino acid residue substitution as well as a carboxy-terminal truncation as compared to a wild-type, Shiga toxin A Subunit. In some embodiments, the disrupted furin-cleavage site comprises one or more amino acid residue deletions and substitutions within the minimal furin-cleavage site R/Y-x-x-R (SEQ ID NO: 159), such as, e.g., for StxA and SLT-1A derived Shiga toxin effector polypeptides, the natively positioned amino acid residue R248 substituted with any non-positively charged, amino acid residue and/or R251 substituted with any non-positively charged, amino acid residue; and for SLT-2A derived Shiga toxin effector polypeptides, the natively positioned amino acid residue Y247 substituted with any non-positively charged, amino acid residue and/or R250 substituted with any non-positively charged, amino acid residue.

[0197] In some embodiments, the disrupted furin-cleavage site comprises both an amino acid substitution within the minimal furin-cleavage site R/Y-x-x-R (SEQ ID NO: 159) and a carboxy-terminal truncation as compared to a wild-type, Shiga toxin A Subunit, such as, e.g., for StxA and SLT-1A derived Shiga toxin effector polypeptides, truncations ending at the natively amino acid position 249, 250, 251, 252, 253, 254, 255, 256, 257, 258, 259, 260, 261, 262, 263, 264, 265, 266, 267, 268, 269, 270, 271, 272, 273, 274, 275, 276, 277, 278, 279, 280, 281, 282, 283, 284, 285, 286, 287, 288, 289, 290, 291, or greater and comprising the natively positioned amino acid residue R248 and/or R251 substituted with any non-positively charged, amino acid residue where appropriate; and for SLT-2A derived Shiga toxin effector polypeptides, truncations ending at the natively amino acid position 248, 249, 250, 251, 252, 253, 254, 255, 256, 257, 258, 259, 260, 261, 262, 263, 264, 265, 266, 267, 268, 269, 270, 271, 272, 273, 274, 275, 276, 277, 278, 279, 280, 281, 282, 283, 284, 285, 286, 287, 288, 289, 290, 291, or greater and comprising the natively positioned amino acid residue Y247 and/or R250 substituted with any non-positively charged, amino acid residue where appropriate.

[0198] In some embodiments, the disrupted furin-cleavage site comprises an insertion of one or more amino acid residues as compared to a wild-type, Shiga toxin A Subunit as long as the inserted amino residue(s) does not create a de novo furin-cleavage site. In some embodiments, the insertion of one or more amino acid residues disrupts the natural spacing between the arginine residues in the minimal, furin-cleavage site R/Y-x-x-R (SEQ ID NO: 159), such as, e.g., StxA and SLT-1A derived polypeptides comprising an insertion of one or more amino acid residues at 249 or 250 and thus between R248 and R251; or SLT-2A derived polypeptides comprising an insertion of one or more amino acid residues at 248 or 249 and thus between Y247 and R250.

[0199] In some embodiments, the disrupted furin-cleavage site comprises both an amino acid residue insertion and a carboxy-terminal truncation as compared to a wild-type, Shiga toxin A Subunit. In some embodiments, the disrupted furin-cleavage site comprises both an amino acid residue insertion and an amino acid residue substitution as compared to a wild-type, Shiga toxin A Subunit. In some embodiments, the disrupted furin-cleavage site comprises both an amino acid residue insertion and an amino acid residue deletion as compared to a wild-type, Shiga toxin A Subunit.

[0200] In some embodiments, the disrupted furin-cleavage site comprises an amino acid residue deletion, an amino acid residue insertion, and an amino acid residue substitution as compared to a wild-type, Shiga toxin A Subunit.

[0201] In some embodiments, the disrupted furin-cleavage site comprises an amino acid residue deletion, insertion, substitution, and carboxy-terminal truncation as compared to a wild-type, Shiga toxin A Subunit.

[0202] In some embodiments, the Shiga toxin effector polypeptide comprising a disrupted furin-cleavage site is directly fused by a peptide bond to a molecular moiety comprising an amino acid, peptide, and/or polypeptide wherein the fused structure involves a single, continuous polypeptide. In these fusion embodiments, the amino acid sequence following the disrupted furin-cleavage site should not create a de novo, furin-cleavage site at the fusion junction.

[0203] Any of the above protease-cleavage resistant, Shiga toxin effector polypeptide sub-regions and/or disrupted furin-cleavage sites may be used alone or in combination with each individual embodiment described herein, including methods.

### 3. T-Cell Hyper-Immunized, Shiga Toxin a Subunit Effector Polypeptides

[0204] In some embodiments, the Shiga toxin effector polypeptide of a PD-L1 targeting molecule described herein comprises an embedded or inserted epitope-peptide. In some embodiments, the epitope-peptide is a heterologous, T-cell epitope-peptide, such as, e.g., an epitope considered heterologous to Shiga toxin A Subunits. In some embodiments, the epitope-peptide is a CD8+ T-cell epitope. In some embodiments, the CD8+ T-cell epitope-peptide has a binding affinity to a MHC class I molecule characterized by a dissociation constant (K_{D}) of 10⁻⁴ molar or less and/or the resulting MHC class I-epitope-peptide complex has a binding affinity to a T-cell receptor (TCR) characterized by a dissociation constant (K_{D}) of 10⁻⁴ molar or less.

[0205] In some embodiments, the Shiga toxin effector polypeptide comprises an embedded or inserted, heterologous, T-cell epitope, such as, e.g., a human CD8+ T-cell epitope. In some embodiments, the heterologous, T-cell epitope is embedded or inserted so as to disrupt an endogenous epitope or epitope region (e.g. a B-cell epitope and/or CD4+ T-cell epitope) identifiable in a naturally occurring Shiga toxin polypeptide or parental Shiga toxin effector polypeptide from which the Shiga toxin effector polypeptide is derived.

[0206] In some embodiments, the Shiga toxin effector polypeptide (and any PD-L1 targeting molecule comprising it) is CD8+ T-cell hyper-immunized, such as, e.g., as compared to a wild-type Shiga toxin polypeptide. Each CD8+ T-cell hyper-immunized, Shiga toxin effector polypeptide comprises an embedded or inserted T-cell epitope-peptide. Hyper-immunized, Shiga toxin effector polypeptides can be created from Shiga toxin effector polypeptides and/or Shiga toxin A Subunit polypeptides, whether naturally occurring or not, using a method described herein, described in WO 2015/113005, and/or known to the skilled worker, wherein the resulting molecule still retains one or more Shiga toxin A Subunit functions.

[0207] For the purposes of the present disclosure, a “T-cell epitope” is a molecular structure which is comprised by an antigenic peptide and can be represented by a linear, amino acid sequence. Commonly, T-cell epitopes are peptides of sizes of eight to eleven amino acid residues (Townsend A, Bodmer H, Annu Rev Immunol 7: 601-24 (1989)); however, certain T-cell epitope-peptides have lengths that are smaller than eight or larger than eleven amino acids long (see e.g. Livingstone A, Fathman C, Annu Rev Immunol 5: 477-501 (1987); Green K et al., Eur J Immunol 34: 2510-9 (2004)). In some embodiments, the embedded or inserted epitope is at least seven amino acid residues in length. In some embodiments, the embedded or inserted epitope is bound by a TCR with a binding affinity characterized by a K_{D} less than 10 mM (e.g. 1-100 μM) as caluclated using the formula in Stone J et al., Immunology 126: 165-76 (2009). However, it should be noted that the binding affinity within a given range between the MHC-epitope and TCR may not correlate with antigenicity and/or immunogenicity (see e.g. Al-Ramadi B et al., J Immunol 155: 662-73 (1995)), such as due to factors like MHC-peptide-TCR complex stability, MHC-peptide density and MHC-independent functions of TCR cofactors such as CD8 (Baker B et al., Immunity 13: 475-84 (2000); Hornell T et al., J Immunol 170: 4506-14 (2003); Woolridge L et al., J Immunol 171: 6650-60 (2003)).

[0208] A heterologous, T-cell epitope is an epitope not already present in a wild-type Shiga toxin A Subunit; a naturally occurring Shiga toxin A Subunit; and/or a parental, Shiga toxin effector polypeptide used as a source polypeptide for modification by a method described herein, described in WO 2015/113005, and/or known to the skilled worker.

[0209] A heterologous, T-cell epitope-peptide may be incorporated into a source polypeptide via numerous methods known to the skilled worker, including, e.g., the processes of creating one or more amino acid substitutions within the source polypeptide, fusing one or more amino acids to the source polypeptide, inserting one or more amino acids into the source polypeptide, linking a peptide to the source polypeptide, and/or a combination of the aforementioned processes. The result of such a method is the creation of a modified variant of the source polypeptide which comprises one or more embedded or inserted, heterologous, T-cell epitope-peptides.

[0210] T-cell epitopes may be chosen or derived from a number of source molecules. T-cell epitopes may be created or derived from various naturally occurring proteins. T-cell epitopes may be created or derived from various naturally occurring proteins foreign to mammals, such as, e.g., proteins of microorganisms. T-cell epitopes may be created or derived from mutated human proteins and/or human proteins aberrantly expressed by malignant human cells. T-cell epitopes may be synthetically created or derived from synthetic molecules (see e.g., Carbone F et al., J Exp Med 167: 1767-9 (1988); Del Val M et al., J Virol 65: 3641-6 (1991); Appella E et al., Biomed Pept Proteins Nucleic Acids 1: 177-84 (1995); Perez S et al., Cancer 116: 2071-80 (2010)).

[0211] Although any T-cell epitope-peptide is contemplated as being used as a heterologous, T-cell epitope, certain epitopes may be selected based on desirable properties. One objective is to create CD8+ T-cell hyper-immunized, Shiga toxin effector polypeptides for administration to vertebrates, meaning that the heterologous, T-cell epitope is highly immunogenic and can elicit robust immune responses in vivo when displayed complexed with a MHC class I molecule on the surface of a cell. In some embodiments, the Shiga toxin effector polypeptide comprises one or more, embedded or inserted, heterologous, T-cell epitopes which are CD8+ T-cell epitopes. A Shiga toxin effector polypeptide that comprises a heterologous, CD8+ T-cell epitope is considered a CD8+ T-cell hyper-immunized, Shiga toxin effector polypeptide.

[0212] T-cell epitope components may be chosen or derived from a number of source molecules already known to be capable of eliciting a vertebrate immune response. T-cell epitopes may be derived from various naturally occurring proteins foreign to vertebrates, such as, e.g., proteins of pathogenic microorganisms and non-self, cancer antigens. In particular, infectious microorganisms may contain numerous proteins with known antigenic and/or immunogenic properties. Further, infectious microorganisms may contain numerous proteins with known antigenic and/or immunogenic sub-regions or epitopes.

[0213] For example, the proteins of intracellular pathogens with mammalian hosts are sources for T-cell epitopes. There are numerous intracellular pathogens, such as viruses, bacteria, fungi, and single-cell eukaryotes, with well-studied antigenic proteins or peptides. T-cell epitopes can be selected or identified from human viruses or other intracellular pathogens, such as, e.g., bacteria like mycobacterium, fungi like toxoplasmae, and protists like trypanosomes.

[0214] For example, there are many immunogenic, viral peptide components of viral proteins from viruses that are infectious to humans. Numerous, human T-cell epitopes have been mapped to peptides within proteins from influenza A viruses, such as peptides in the proteins HA glycoproteins FE17, S139/1, CH65, C05, hemagglutin 1 (HA1), hemagglutinin 2 (HA2), nonstructural protein 1 and 2 (NS1 and NS 2), matrix protein 1 and 2 (M1 and M2), nucleoprotein (NP), neuraminidase (NA)), and many of these peptides have been shown to elicit human immune responses, such as by using ex vivo assay. Similarly, numerous, human T-cell epitopes have been mapped to peptide components of proteins from human cytomegaloviruses (HCMV), such as peptides in the proteins pp65 (UL83), UL128-131, immediate-early 1 (IE-1; UL123), glycoprotein B, tegument proteins, and many of these peptides have been shown to elicit human immune responses, such as by using ex vivo assays.

[0215] Another example is there are many immunogenic, cancer antigens in humans. The CD8+ T-cell epitopes of cancer and/or tumor cell antigens can be identified by the skilled worker using techniques known in the art, such as, e.g., differential genomics, differential proteomics, immunoproteomics, prediction then validation, and genetic approaches like reverse-genetic transfection (see e.g., Admon A et al., Mol Cell Proteomics 2: 388-98 (2003); Purcell A, Gorman J, Mol Cell Proteomics 3: 193-208 (2004); Comber J, Philip R, Ther Adv Vaccines 2: 77-89 (2014)). There are many antigenic and/or immunogenic T-cell epitopes already identified or predicted to occur in human cancer and/or tumor cells. For example, T-cell epitopes have been predicted in human proteins commonly mutated or overexpressed in neoplastic cells, such as, e.g., ALK, CEA, N-acetylglucosaminyl-transferase V (GnT-V), HCA587, PD-L1/neu, MAGE, Melan-A/MART-1, MUC-1, p53, and TRAG-3 (see e.g., van der Bruggen P et al., Science 254: 1643-7 (1991); Kawakami Y et al., J Exp Med 180: 347-52 (1994); Fisk B et al., J Exp Med 181: 2109-17 (1995); Guilloux Y et al., J Exp Med 183: 1173 (1996); Skipper J et al., J Exp Med 183: 527 (1996); Brossart P et al., 93: 4309-17 (1999); Kawashima I et al., Cancer Res 59: 431-5 (1999); Papadopoulos K et al., Clin Cancer Res 5: 2089-93 (1999); Zhu B et al., Clin Cancer Res 9: 1850-7 (2003); Li B et al., Clin Exp Immunol 140: 310-9 (2005); Ait-Tahar K et al., Int J Cancer 118: 688-95 (2006); Akiyama Y et al., Cancer Immunol Immunother 61: 2311-9 (2012)). In addition, synthetic variants of T-cell epitopes from human cancer cells have been created (see e.g., Lazoura E, Apostolopoulos V, Curr Med Chem 12: 629-39 (2005); Douat-Casassus C et al., J Med Chem 50: 1598-609 (2007)).

[0216] While any T-cell epitope may be used in the polypeptides and molecules described herein, certain T-cell epitopes may be preferred based on their known and/or empirically determined characteristics. For example, in many species, the MHC alleles in its genome encode multiple MHC-I molecular variants. Because MHC class I protein polymorphisms can affect antigen-MHC class I complex recognition by CD8+ T-cells, T-cell epitopes may be chosen based on knowledge about certain MHC class I polymorphisms and/or the ability of certain antigen-MHC class I complexes to be recognized by T-cells having different genotypes.

[0217] There are well-defined peptide-epitopes that are known to be immunogenic, MHC class I restricted, and/or matched with a specific human leukocyte antigen (HLA) variant(s). For applications in humans or involving human target cells, HLA-class I-restricted epitopes can be selected or identified by the skilled worker using standard techniques known in the art. The ability of peptides to bind to human MHC class I molecules can be used to predict the immunogenic potential of putative T-cell epitopes. The ability of peptides to bind to human MHC class I molecules can be scored using software tools. T-cell epitopes may be chosen for use as a heterologous, T-cell epitope component based on the peptide selectivity of the HLA variants encoded by the alleles more prevalent in certain human populations. For example, the human population is polymorphic for the alpha chain of MHC class I molecules due to the varied alleles of the HLA genes from individual to individual. In certain T-cell epitopes may be more efficiently presented by a specific HLA molecule, such as, e.g., the commonly occurring HLA variants encoded by the HLA-A allele groups HLA-A2 and HLA-A3.

[0218] An example of a CD8+ T-cell epitope is SIINFEKYL (SEQ ID NO:79). According to the Immune Epitope Database (IEDB), this peptide-epitope is bound by human HLA-A*02:01. This peptide-epitope is scored for the ability to bind to common human MHC class I human leukocyte antigen (HLA) variants encoded by the more prevalent alleles in human populations using the Immune Epitope Database (IEDB) Analysis Resource MHC-I binding prediction's consensus tool and recommended parameters (Kim Y et al., Nucleic Acids Res 40: W252-30 (2012)). The IEDB MHC-I binding prediction analysis indicated higher-affinity binders with lower percentile rankings. This peptide-epitope percentile rank was predicted to be 0.74 for binding to human HLA-A*02:01.

[0219] When choosing T-cell epitopes for use as a heterologous, T-cell epitope component, multiple factors may be considered that can influence epitope generation and transport to receptive MHC class I molecules, such as, e.g., the presence and epitope specificity of the following factors in the target cell: proteasome, ERAAP/ERAP1, tapasin, and TAPs.

[0220] When choosing T-cell epitopes for use as a heterologous, T-cell epitope component of the molecules described herein, an epitope may be selected which best match the MHC class I molecules present in the cell-type or cell populations to be targeted. Different MHC class I molecules exhibit preferential binding to particular peptide sequences, and particular peptide-MHC class I variant complexes are specifically recognized by the t-cell receptors (TCRs) of effector T-cells. The skilled worker can use knowledge about MHC class I molecule specificities and TCR specificities to optimize the selection of heterologous, T-cell epitopes.

[0221] In addition, multiple, immunogenic, T-cell epitopes for MHC class I presentation may be embedded in the same Shiga toxin effector polypeptide for use, such as, e.g., in the targeted delivery of a plurality of T-cell epitopes simultaneously.

[0222] Any of the protease-cleavage resistant, Shiga toxin effector polypeptide sub-regions and/or disrupted furin-cleavage sites described herein may be used alone or in combination with each individual embodiment described herein, including methods.

### C. Additional Exogenous Materials

[0223] In some embodiments, the PD-L1 targeting molecules comprise an additional exogenous material. An “additional exogenous material” as used herein refers to one or more atoms or molecules, often not generally present in both Shiga toxins and native target cells, where the PD-L1 targeting molecule can be used to specifically transport such material to the interior of a cell. In one sense, the entire PD-L1 targeting molecule is an exogenous material which will enter the cell; thus, the “additional” exogenous materials are heterologous materials linked to but other than the core PD-L1 targeting molecule itself. Non-limiting examples of additional exogenous materials are radionucleides, peptides, detection promoting agents, proteins, small molecule chemotherapeutic agents, and polynucleotides.

[0224] In some embodiments of the PD-L1 targeting molecules, the additional exogenous material is one or more radionucleides, such as, e.g., ²¹¹At, ¹³¹I, ¹²⁵I, ⁹⁰Y, ¹¹¹In, ¹⁸⁶Re, ¹⁸⁸Re, ¹⁵³Sm, ²¹²Bi, ³²P, ⁶⁰C, and/or radioactive isotopes of lutetium.

[0225] In some embodiments, the additional exogenous material comprises a proapoptotic peptide, polypeptide, or protein, such as, e.g., BCL-2, caspases (e.g. fragments of caspase-3 or caspase-6), cytochromes, granzyme B, apoptosis-inducing factor (AIF), BAX, tBid (truncated Bid), and proapoptotic fragments or derivatives thereof (see e.g., Ellerby H et al., Nat Med 5: 1032-8 (1999); Mai J et al., Cancer Res 61: 7709-12 (2001); Jia L et al., Cancer Res 63: 3257-62 (2003); Liu Y et al., Mol Cancer Ther 2: 1341-50 (2003); Perea S et al., Cancer Res 64: 7127-9 (2004); Xu Y et al., J Immunol 173: 61-7 (2004), Dälken B et al., Cell Death Differ 13: 576-85 (2006); Wang T et al., Cancer Res 67: 11830-9 (2007); Kwon M et al., Mol Cancer Ther 7: 1514-22 (2008); Qiu X et al., Mol Cancer Ther 7: 1890-9 (2008); Shan L et al., Cancer Biol Ther 11: 1717-22 (2008); Wang F et al., Clin Cancer Res 16: 2284-94 (2010); Kim J et al., J Virol 85: 1507-16 (2011)).

[0226] In some embodiments, the additional exogenous material comprises a protein or polypeptide comprising an enzyme. In certain other embodiments, the additional exogenous material is a nucleic acid, such as, e.g. a ribonucleic acid that functions as a small inhibiting RNA (siRNA) or microRNA (miRNA). In some embodiments, the additional exogenous material is an antigen, such as antigens derived from pathogens, bacterial proteins, viral proteins, proteins mutated in cancer, proteins aberrantly expressed in cancer, or T-cell complementary determining regions. For example, exogenous materials include antigens, such as those characteristic of antigen-presenting cells infected by bacteria, and T-cell complementary determining regions capable of functioning as exogenous antigens. Exogenous materials comprising polypeptides or proteins may optionally comprise one or more antigens whether known or unknown to the skilled worker.

[0227] In some embodiments of the PD-L1 targeting molecules, all heterologous antigens and/or epitopes associated with the Shiga toxin effector polypeptide are arranged in the PD-L1 targeting molecule amino-terminal to the carboxy-terminus of the Shiga toxin A1 fragment region of the Shiga toxin effector polypeptide. In some embodiments, all heterologous antigens and/or epitopes associated with the Shiga toxin effector polypeptide are associated, either directly or indirectly, with the Shiga toxin effector polypeptide at a position amino-terminal to the carboxy-terminus of the Shiga toxin A1 fragment region of the Shiga toxin effector polypeptide. In some embodiments, all additional exogenous material(s) which is an antigen is arranged amino-terminal to the Shiga toxin effector polypeptide, such as, e.g., fused directly or indirectly to the amino terminus of the Shiga toxin effector polypeptide.

[0228] In some embodiments of the PD-L1 targeting molecules, the additional exogenous material is a cytotoxic agent, such as, e.g., a small molecule chemotherapeutic agent, anti-neoplastic agent, cytotoxic antibiotic, alkylating agent, antimetabolite, topoisomerase inhibitor, and/or tubulin inhibitor (e.g., monomethylauristatin F (MMAF), paclitazel, laulimalide, vinblastine, colchicine, ZD6126, CA-4, CA-4P, oxi4503, AVE8062, phenstatin, CC-5079, podophyllotoxin, steganacin, nocodazole, curacin A, 2-ME, ENMD-1198, ABT-751, T138067, BCN-105P, indibulin, crolibulin, MPI-0441138, MPC-6827, CYT997, MN-029, CI-980, CP-248, CP-461, and TN16). Non-limiting examples of cytotoxic agents suitable for use as described herein include aziridines, cisplatins, tetrazines, procarbazine, hexamethylmelamine, vinca alkaloids, taxanes, camptothecins, etoposide, doxorubicin, mitoxantrone, teniposide, novobiocin, aclarubicin, anthracyclines, actinomycin, amanitin, amatoxins, bleomycin, centanamycin (indolecarboxamide), plicamycin, mitomycin, daunorubicin, epirubicin, idarubicins, dolastatins, maytansines, maytansionoids, duromycin, docetaxel, duocarmycins, adriamycin, calicheamicin, auristatins, pyrrolobenzodiazepines, pyrrolobenzodiazepine dimers (PBDs), carboplatin, 5-fluorouracil (5-FU), capecitabine, mitomycin C, paclitaxel, 1,3-Bis(2-chloroethyl)-1-nitrosourea (BCNU), rifampicin, cisplatin, methotrexate, gemcitabine, aceglatone, acetogenins (e.g. bullatacin and bullatacinone), aclacinomysins, AG1478, AG1571, aldophosphamide glycoside, alkyl sulfonates (e.g., busulfan, improsulfan, and piposulfan), alkylating agents (e.g. thiotepa and cyclosphosphamide), aminolevulinic acid, aminopterin, amsacrine, ancitabine, anthramycin, arabinoside, azacitidine, azaserine, aziridines (e.g., benzodopa, carboquone, meturedopa, and uredopa), azauridine, bestrabucil, bisantrene, bisphosphonates (e.g. clodronate), bleomycins, bortezomib, bryostatin, cactinomycin, callystatin, carabicin, carminomycin, carmofur, carmustine, carzinophilin, CC-1065, chlorambucil, chloranbucil, chlornaphazine, chlorozotocin, chromomycinis, chromoprotein enediyne antibiotic chromophores, CPT-11, cryptophycins (e.g. cryptophycin 1 and cryptophycin 8), cyclophosphamide, cytarabine, dacarbazine, dactinomycin, daunomycin, defofamine, demecolcine, detorubicin, diaziquone, 6-diazo-5-oxo-L-norleucine, dideoxyuridine, difluoromethylornithine (DMFO), doxifluridine, doxorubicins (e.g., morpholinodoxorubicin, cyanomorpholino-doxorubicin, 2-pyrrolinodoxorubicin, and deoxydoxorubicin), dynemicins, edatraxate, edatrexate, el eutherobins, elformithine, elliptinium acetate, enediyne antibiotics (e.g. calicheamicins), eniluracil, enocitabine, epirubicins, epothilone, esorubicins, esperamicins, estramustine, ethylenimines, 2-ethylhydrazide, etoglucid, fludarabine, folic acid analogues (e.g., denopterin, methotrexate, pteropterin, and trimetrexate), folic acid replenishers (e.g. frolinic acid), fotemustine, fulvestrant, gacytosine, gallium nitrate, gefitinib, gemcitabine, hydroxyurea, ibandronate, ifosfamide, imatinib mesylate, erlotinib, fulvestrant, letrozole, PTK787/ZK 222584 (Novartis, Basel, CH), oxaliplatin, leucovorin, rapamycin, lapatinib, lonafarnib, sorafenib, methylamelamines (e.g., altretamine, triethylenemelamine, triethy lenephosphoramide, triethylenethiophosphoramide and trimethylomelamine), pancratistatins, sarcodictyins, spongistatins, nitrogen mustards (e.g., chlorambucil, chlornaphazine, cyclophosphamide, mechlorethamine, mechlorethamine oxide hydrochloride, melphalan, novembichin, phenesterine, prednimustine, trofosfamide, and uracil mustard), nitrosureas (e.g., carmustine, fotemustine, lomustine, nimustine, and ranimnustine), dynemicins, neocarzinostatin chromophores, anthramycin, detorubicin, epirubicins, marcellomycins, mitomycins (e.g. mitomycin C), mycophenolic acid, nogalamycins, olivomycins, peplomycins, potfiromycins, puromycins, quelamycins, rodorubicins, ubenimex, zinostatins, zorubicins, purine analogs (e.g., fludarabine, 6-mercaptopurine, thiamiprine, and thioguanine), pyrimidine analogs (e.g., ancitabine, azacitidine, 6-azauridine, dideoxyuridine, doxifluridine, enocitabine, and floxuridine), aceglatone, lentinan, lonidainine, maytansinoids (e.g. maytansins and ansamitocins), mitoguazone, mitoxantrone, mopidanmol, nitraerine, pentostatin, phenamet, pirarubicin, podophyllinic acid, 2-ethylhydrazide, rhizoxin, sizofuran, spirogermanium, tenuazonic acid, triaziquone, 2,2′,2″trichlorotriethylamine, trichothecenes (e.g., T-2 toxin, verracurin A, roridin A, and anguidine), urethan, vindesine, mannomustine, mitobronitol, mitolactol, pipobroman, arabinoside, cyclophosphamide, toxoids (e.g. paclitaxel and doxetaxel), 6-thioguanine, mercaptopurine, platinum, platinum analogs (e.g. cisplatin and carboplatin), etoposide (VP-16), mitoxantrone, vinorelbine, novantrone, daunomycin, xeloda, topoisomerase inhibitor RFS 2000, retinoids (e.g. retinoic acid), capecitabine, lomustine, losoxantrone, mercaptopurines, nimustine, nitraerine, rapamycin, razoxane, roridin A, spongistatins, streptonigrins, streptozocins, sutent, T-2 toxin, thiamiprine, thiotepa, toxoids (e.g. paclitaxel and doxetaxel), tubercidins, verracurin A, vinblastine, vincristine, and structural analogs of any of the aforementioned (e.g. synthetic analogs), and/or derivatives of any of the aforementioned (see e.g., Lindell T et al., Science 170: 447-9 (1970); Remillard S et al., Science 189: 1002-5 (1975); Ravry M et al., Am J Clin Oncol 8: 148-50 (1985); Ravry M et al., Cancer Treat Rep 69: 1457-8 (1985); Sternberg C et al., Cancer 64: 2448-58 (1989); Bai R et al., Biochem Pharmacol 39: 1941-9 (1990); Boger D, Johnson D, Proc Natl Acad Sci USA 92: 3642-9 (1995); Beck J et al., Leuk Lymphoma 41: 117-24 (2001); Cassady J et al., Chem Pharm Bull (Tokyo) 52: 1-26 (2004); Sapra P et al., Clin Cancer Res 11: 5257-64 (2005); Okeley N et al., Clinc Cancer Res 16: 888-97 (2010); Oroudjev E et al., Mol Cancer Ther 9: 2700-13 (2010); Ellestad G, Chirality 23: 660-71 (2011); Kantarjian H et al., Lancet Oncol 13: 403-11 (2012); Moldenhauer G et al., J Natl Cancer Inst 104: 622-34 (2012); Meulendijks D et al., Invest New Drugs 34: 119-28 (2016)).

II. Linkages Connecting Components and/or their Subcomponents

[0229] Individual PD-L1 binding regions, Shiga toxin effector polypeptides, and/or components of the PD-L1 targeting molecules described herein may be suitably linked to each other via one or more linkers well known in the art and/or described herein. Individual polypeptide subcomponents of the binding regions, e.g. heavy chain variable regions (V_{H}), light chain variable regions (V_{L}), CDR, and/or ABR regions, may be suitably linked to each other via one or more linkers well known in the art and/or described herein. Proteinaceous components, e.g., multi-chain binding regions, may be suitably linked to each other or other polypeptide components via one or more linkers well known in the art. Peptide components, e.g., KDEL family endoplasmic reticulum retention/retrieval signal motifs, may be suitably linked to another component via one or more linkers, such as a proteinaceous linker, which are well known in the art.

[0230] Suitable linkers are generally those which allow each polypeptide component to fold with a three-dimensional structure very similar to the polypeptide components produced individually without any linker or other component. Suitable linkers include single amino acids, peptides, polypeptides, and linkers lacking any of the aforementioned, such as various non-proteinaceous carbon chains, whether branched or cyclic.

[0231] Suitable linkers may be proteinaceous and comprise one or more amino acids, peptides, and/or polypeptides. Proteinaceous linkers are suitable for both recombinant fusion proteins and chemically linked conjugates. A proteinaceous linker typically has from about 2 to about 50 amino acid residues, such as, e.g., from about 5 to about 30 or from about 6 to about 25 amino acid residues. The length of the linker selected will depend upon a variety of factors, such as, e.g., the desired property or properties for which the linker is being selected. In some embodiments, the linker is proteinaceous and is linked near the terminus of a protein component, typically within about 20 amino acids of the terminus. In some embodiments, a proteinaceous linker comprises a sequence of any one of SEQ ID NO: 70-76, 289, or 285.

[0232] Suitable linkers may be non-proteinaceous, such as, e.g. chemical linkers. Various non-proteinaceous linkers known in the art may be used to link cell-targeting binding regions to the Shiga toxin effector polypeptide components of the PD-L1 targeting molecules, such as linkers commonly used to conjugate immunoglobulin polypeptides to heterologous polypeptides. For example, polypeptide regions may be linked using the functional side chains of their amino acid residues and carbohydrate moieties such as, e.g., a carboxy, amine, sulfhydryl, carboxylic acid, carbonyl, hydroxyl, and/or cyclic ring group. For example, disulfide bonds and thioether bonds may be used to link two or more polypeptides. In addition, non-natural amino acid residues may be used with other functional side chains, such as ketone groups. Examples of non-proteinaceous chemical linkers include but are not limited to N-succinimidyl (4-iodoacetyl)-aminobenzoate, S—(N-succinimidyl) thioacetate (SATA), N-succinimidyl-oxycarbonyl-cu-methyl-α-(2-pyridyldithio) toluene (SMPT), N-succinimidyl 4-(2-pyridyldithio)-pentanoate (SPP), succinimidyl 4-(N-maleimidomethyl) cyclohexane carboxylate (SMCC or MCC), sulfosuccinimidyl (4-iodoacetyl)-aminobenzoate, 4-succinimidyl-oxycarbonyl-α-(2-pyridyldithio) toluene, sulfosuccinimidyl-6-(α-methyl-α-(pyridyldithiol)-toluamido) hexanoate, N-succinimidyl-3-(-2-pyridyldithio)-proprionate (SPDP), succinimidyl 6(3(-(-2-pyridyldithio)-proprionamido) hexanoate, sulfosuccinimidyl 6(3(-(-2-pyridyldithio)-propionamido) hexanoate, maleimidocaproyl (MC), maleimidocaproyl-valine-citrulline-p-aminobenzyloxycarbonyl (MC-vc-PAB), 3-maleimidobenzoic acid N-hydroxysuccinimide ester (MBS), alpha-alkyl derivatives, sulfoNHS-ATMBA (sulfosuccinimidyl N-[3-(acetylthio)-3-methylbutyryl-beta-alanine]), sulfodichlorophenol, 2-iminothiolane, 3-(2-pyridyldithio)-propionyl hydrazide, Ellman's reagent, dichlorotriazinic acid, and S-(2-thiopyridyl)-L-cysteine.

[0233] Suitable linkers, whether proteinaceous or non-proteinaceous, may include, e.g., protease sensitive, environmental redox potential sensitive, pH sensitive, acid cleavable, photocleavable, and/or heat sensitive linkers.

[0234] Proteinaceous linkers may be chosen for incorporation into recombinant fusion PD-L1 targeting molecules. For recombinant fusion cell-targeting proteins, linkers typically comprise about 2 to 50 amino acid residues, preferably about 5 to 30 amino acid residues. Commonly, proteinaceous linkers comprise a majority of amino acid residues with polar, uncharged, and/or charged residues, such as, e.g., threonine, proline, glutamine, glycine, and alanine. Non-limiting examples of proteinaceous linkers include alanine-serine-glycine-glycine-proline-glutamate (ASGGPE) (SEQ ID NO: 167), valine-methionine (VM), alanine-methionine (AM), AM(G_{2 to 4}S)ₓAM where G is glycine, S is serine, and x is an integer from 1 to 10 (SEQ ID NO: 168).

[0235] Proteinaceous linkers may be selected based upon the properties desired. Proteinaceous linkers may be chosen by the skilled worker with specific features in mind, such as to optimize one or more of the fusion molecule's folding, stability, expression, solubility, pharmacokinetic properties, pharmacodynamic properties, and/or the activity of the fused domains in the context of a fusion construct as compared to the activity of the same domain by itself. For example, proteinaceous linkers may be selected based on flexibility, rigidity, and/or cleavability. The skilled worker may use databases and linker design software tools when choosing linkers. In certain linkers may be chosen to optimize expression. In certain linkers may be chosen to promote intermolecular interactions between identical polypeptides or proteins to form homomultimers or different polypeptides or proteins to form heteromultimers. For example, proteinaceous linkers may be selected which allow for desired non-covalent interactions between polypeptide components of the PD-L1 targeting molecules, such as, e.g., interactions related to the formation dimers and other higher order multimers.

[0236] Flexible proteinaceous linkers are often greater than 12 amino acid residues long and rich in small, non-polar amino acid residues, polar amino acid residues, and/or hydrophilic amino acid residues, such as, e.g., glycines, serines, and threonines. Flexible proteinaceous linkers may be chosen to increase the spatial separation between components and/or to allow for intramolecular interactions between components. For example, various “GS” linkers are known to the skilled worker and are composed of multiple glycines and/or one or more serines, sometimes in repeating units, such as, e.g., (GₓS)ₙ (SEQ ID NO: 169), (SₓG)ₙ (SEQ ID NO: 170), (GGGGS)ₙ (SEQ ID NO: 171), and (G)ₙ (SEQ ID NO: 172), in which x is 1 to 6 and n is 1 to 30. Non-limiting examples of flexible proteinaceous linkers include GKSSGSGSESKS (SEQ ID NO: 173), EGKSSGSGSESKEF (SEQ ID NO: 174), GSTSGSGKSSEGKG (SEQ ID NO: 175), GSTSGSGKSSEGSGSTKG (SEQ ID NO: 176), GSTSGSGKPGSGEGSTKG (SEQ ID NO: 177), SRSSG (SEQ ID NO: 178), and SGSSC (SEQ ID NO: 179).

[0237] Rigid proteinaceous linkers are often stiff alpha-helical structures and rich in proline residues and/or one or more strategically placed prolines. Rigid linkers may be chosen to prevent intramolecular interactions between linked components.

[0238] Suitable linkers may be chosen to allow for in vivo separation of components, such as, e.g., due to cleavage and/or environment-specific instability. In vivo cleavable proteinaceous linkers are capable of unlinking by proteolytic processing and/or reducing environments often at a specific site within an organism or inside a certain cell type. In vivo cleavable proteinaceous linkers often comprise protease sensitive motifs and/or disulfide bonds formed by one or more cysteine pairs. In vivo cleavable proteinaceous linkers may be designed to be sensitive to proteases that exist only at certain locations in an organism, compartments within a cell, and/or become active only under certain physiological or pathological conditions (such as, e.g., involving proteases with abnormally high levels, proteases overexpressed at certain disease sites, and proteases specifically expressed by a pathogenic microorganism). For example, there are proteinaceous linkers known in the art which are cleaved by proteases present only intracellularly, proteases present only within specific cell types, and proteases present only under pathological conditions like cancer or inflammation, such as, e.g., R-x-x-R (SEQ ID NO: 160) motif and AMGRSGGGCAGNRVGSSLSCGGLNLQAM (SEQ ID NO: 165). In some embodiments, the linker comprises the sequence HHAA (SEQ ID NO: 187). In some embodiments, the linker comprises the sequence HHHHHHAA (SEQ ID NO: 260).

[0239] In some embodiments of the PD-L1 targeting molecules, a linker may be used which comprises one or more protease sensitive sites to provide for cleavage by a protease present within a target cell. In some embodiments of the PD-L1 targeting molecules, a linker may be used which is not cleavable to reduce unwanted toxicity after administration to a vertebrate organism.

[0240] Suitable linkers may include, e.g., protease sensitive, environmental redox potential sensitive, pH sensitive, acid cleavable, photocleavable, and/or heat sensitive linkers, whether proteinaceous or non-proteinaceous (see e.g., Doronina S et al., Bioconjug Chem 17: 114-24 (2003); Saito G et al., Adv Drug Deliv Rev 55: 199-215 (2003); Jeffrey S et al., J Med Chem 48: 1344-58 (2005); Sanderson R et al., Clin Cancer Res 11: 843-52 (2005); Erickson H et al., Cancer Res 66: 4426-33 (2006); Chen X et al., Adv Drug Deliv Rev 65: 1357-69 (2013)). Suitable cleavable linkers may include linkers comprising cleavable groups which are known in the art.

[0241] Suitable linkers may include pH sensitive linkers. For example, certain suitable linkers may be chosen for their instability in lower pH environments to provide for dissociation inside a subcellular compartment of a target cell (see e.g., van Der Velden V et al., Blood 97: 3197-204 (2001); Ulbrich K, Subr V, Adv Drug Deliv Rev 56: 1023-50 (2004)). For example, linkers that comprise one or more trityl groups, derivatized trityl groups, bismaleimideothoxy propane groups, adipic acid dihydrazide groups, and/or acid labile transferrin groups, may provide for release of components of the PD-L1 targeting molecules, e.g. a polypeptide component, in environments with specific pH ranges. In certain linkers may be chosen which are cleaved in pH ranges corresponding to physiological pH differences between tissues, such as, e.g., the pH of tumor tissue is lower than in healthy tissues.

[0242] Photocleavable linkers are linkers that are cleaved upon exposure to electromagnetic radiation of certain wavelength ranges, such as light in the visible range. Photocleavable linkers may be used to release a component of a PD-L1 targeting molecule, e.g. a polypeptide component, upon exposure to light of certain wavelengths. Non-limiting examples of photocleavable linkers include a nitrobenzyl group as a photocleavable protective group for cysteine, nitrobenzyloxycarbonyl chloride cross-linkers, hydroxypropylmethacrylamide copolymer, glycine copolymer, fluorescein copolymer, and methylrhodamine copolymer. Photocleavable linkers may have particular uses in linking components to form PD-L1 targeting molecules designed for treating diseases, disorders, and conditions that can be exposed to light using fiber optics.

[0243] In some embodiments of the PD-L1 targeting molecules, a PD-L1 binding region is linked to a Shiga toxin effector polypeptide using any number of means known to the skilled worker, including both covalent and noncovalent linkages.

[0244] In some embodiments of the PD-L1 targeting molecules, the molecule comprises a binding region which is a scFv with a linker connecting a heavy chain variable (V_{H}) domain and a light chain variable (V_{L}) domain. There are numerous linkers known in the art suitable for this purpose, such as, e.g., the 15-residue (Gly₄Ser)₃ peptide (SEQ ID NO: 180). Suitable scFv linkers which may be used in forming non-covalent multivalent structures include GGS, GGGS (SEQ ID NO: 181), GGGGS (SEQ ID NO: 182), GGGGSGGG (SEQ ID NO: 183), GGSGGGG (SEQ ID NO: 184), GSTSGGGSGGGSGGGGSS (SEQ ID NO: 185), and GSTSGSGKPGSSEGSTKG (SEQ ID NO: 186).

[0245] Suitable methods for linkage of the components of the PD-L1 targeting molecules may be by any method presently known in the art for accomplishing such, so long as the attachment does not substantially impede the binding capability of the cell-targeting binding region, the cellular internalization of the Shiga toxin effector polypeptide component, and/or when appropriate the desired Shiga toxin effector function(s) as measured by an appropriate assay, including assays described herein.

[0246] The components of the PD-L1 targeting molecule, e.g. a Shiga toxin A Subunit effector polypeptide and/or immunoglobulin-type PD-L1-binding region, may be engineered to provide a suitable attachment moiety for the linkage of additional components, e.g. an additional exogenous material (see WO 2018/106895).

[0247] For the purposes of the PD-L1 targeting molecules, the specific order or orientation is not fixed for the components: the Shiga toxin effector polypeptide(s), the binding region(s), and any optional linker(s), in relation to each other or the entire PD-L1 targeting molecule (see e.g. FIG. 1) unless specifically noted. The components of the PD-L1 targeting molecules may be arranged in any order provided that the desired activity(ies) of the binding region and Shiga toxin effector polypeptide are not eliminated.

### III. Examples of Structural Variations of the PD-L1 Targeting Molecules

[0248] In some embodiments, a Shiga toxin effector polypeptide of the PD-L1 targeting molecule comprises or consists essentially of a truncated Shiga toxin A Subunit. Truncations of Shiga toxin A Subunits might result in the deletion of an entire epitope(s) and/or epitope region(s), B-cell epitopes, CD4+ T-cell epitopes, and/or furin-cleavage sites without affecting Shiga toxin effector functions, such as, e.g., catalytic activity and cytotoxicity. The smallest Shiga toxin A Subunit fragment shown to exhibit full enzymatic activity was a polypeptide composed of residues 1-239 of Slt1A (LaPointe P et al., J Biol Chem 280: 23310-18 (2005)). The smallest Shiga toxin A Subunit fragment shown to exhibit significant enzymatic activity was a polypeptide composed of residues 75-247 of StxA (Al-Jaufy A et al., Infect Immun 62: 956-60 (1994)).

[0249] Although Shiga toxin effector polypeptides may commonly be smaller than the full-length Shiga toxin A Subunit, it is preferred that the Shiga toxin effector polypeptide region of a PD-L1 targeting molecule maintain the polypeptide region from amino acid position 77 to 239 (SLT-1A (SEQ ID NO:1) or StxA (SEQ ID NO:2)) or the equivalent in other A Subunits of members of the Shiga toxin family (e.g. 77 to 238 of (SEQ ID NO:3)). For example, in some embodiments of the molecules, the Shiga toxin effector polypeptide derived from SLT-1A may comprise or consist essentially of amino acids 75 to 251 of SEQ ID NO:1, 1 to 241 of SEQ ID NO:1, 1 to 251 of SEQ ID NO:1, or amino acids 1 to 261 of SEQ ID NO:1, wherein relative to a wild-type Shiga toxin A Subunit at least one amino acid residue is mutated or has been deleted in an endogenous epitope and/or epitope region, and/or wherein there is a disrupted, furin-cleavage site at the carboxy-terminus of a Shiga toxin A1 fragment derived region. Similarly, Shiga toxin effector polypeptide regions derived from StxA may comprise or consist essentially of amino acids 75 to 251 of SEQ ID NO:2, 1 to 241 of SEQ ID NO:2, 1 to 251 of SEQ ID NO:2, or amino acids 1 to 261 of SEQ ID NO:2, wherein relative to a wild-type Shiga toxin A Subunit at least one amino acid residue is mutated or has been deleted in an endogenous epitope and/or epitope region, and/or wherein there is a disrupted, furin-cleavage site at the carboxy-terminus of a Shiga toxin A1 fragment derived region. Additionally, Shiga toxin effector polypeptide regions derived from SLT-2 may comprise or consist essentially of amino acids 75 to 251 of SEQ ID NO:3, 1 to 241 of SEQ ID NO:3, 1 to 251 of SEQ ID NO:3, or amino acids 1 to 261 of SEQ ID NO:3, wherein relative to a wild-type Shiga toxin A Subunit at least one amino acid residue is mutated or has been deleted in an endogenous epitope and/or epitope region, and/or wherein there is a disrupted, furin-cleavage site at the carboxy-terminus of a Shiga toxin A1 fragment derived region.

[0250] Also provided herein are variants of Shiga toxin effector polypeptides and PD-L1 targeting molecules, wherein the Shiga toxin effector polypeptide differs from a naturally occurring Shiga toxin A Subunit by only or up to 1, 2, 3, 4, 5, 6, 7, 8, 9, 10, 15, 20, 25, 30, 35, 40 or more amino acid residues (but by no more than that which retains at least 85%, 90%, 95%, 99% or more amino acid sequence identity). Thus, a molecule derived from an A Subunit of a member of the Shiga toxin family may comprise additions, deletions, truncations, or other alterations from the original sequence as long as at least 85%, 90%, 95%, 99% or more amino acid sequence identity is maintained to a naturally occurring Shiga toxin A Subunit and wherein relative to a wild-type Shiga toxin A Subunit at least one amino acid residue is mutated or has been deleted in an endogenous epitope and/or epitope region, and/or wherein there is a disrupted, furin-cleavage site at the carboxy-terminus of a Shiga toxin A1 fragment derived region.

[0251] Accordingly, in some embodiments, the Shiga toxin effector polypeptide of a molecule comprises or consists essentially of amino acid sequences having at least 55%, 60%, 65%, 70%, 75%, 80%, 85%, 90%, 95%, 97%, 98%, 99%, 99.5% or 99.7% overall sequence identity to a naturally occurring Shiga toxin A Subunit, such as SLT-1A (SEQ ID NO:1), StxA (SEQ ID NO:2), and/or SLT-2A (SEQ ID NO:3) wherein relative to a wild-type Shiga toxin A Subunit at least one amino acid residue is mutated or has been deleted in an endogenous epitope and/or epitope region, and/or wherein there is a disrupted, furin-cleavage site at the carboxy-terminus of a Shiga toxin A1 fragment derived region.

[0252] Optionally, either a full-length or a truncated version of the Shiga toxin A Subunit may comprise the Shiga toxin effector polypeptide region of a molecule of the present, wherein the Shiga toxin derived polypeptide comprises one or more mutations (e.g. substitutions, deletions, insertions, or inversions) as compared to a naturally occurring Shiga toxin. In some embodiments, the Shiga toxin effector polypeptides have sufficient sequence identity to a naturally occurring Shiga toxin A Subunit to retain cytotoxicity after entry into a cell, either by well-known methods of host cell transformation, transfection, infection or induction, or by internalization mediated by a cell-targeting binding region linked with the Shiga toxin effector polypeptide. The most critical residues for enzymatic activity and/or cytotoxicity in the Shiga toxin A Subunits have been mapped to the following residue-positions: asparagine-75, tyrosine-77, glutamate-167, arginine-170, and arginine-176 among others (Di R et al., Toxicon 57: 525-39 (2011)). In any one of the embodiments, the Shiga toxin effector polypeptides may preferably but not necessarily maintain one or more conserved amino acids at positions, such as those found at positions 77, 167, 170, and 176 in StxA, SLT-1A, or the equivalent conserved position in other members of the Shiga toxin family which are typically required for cytotoxic activity. The capacity of a cytotoxic molecule to cause cell death, e.g. its cytotoxicity, may be measured using any one or more of a number of assays well known in the art.

### A. Examples of De-Immunized, Shiga Toxin Effector Polypeptides

[0253] In some embodiments, the de-immunized, Shiga toxin effector polypeptide of the PD-L1 targeting molecule may consist essentially of a truncated Shiga toxin A Subunit having two or more mutations. Truncations of Shiga toxin A Subunits might result in the deletion of an entire epitope(s) and/or epitope region(s), B-cell epitopes, CD4+ T-cell epitopes, and/or furin-cleavage sites without affecting Shiga toxin effector functions, such as, e.g., catalytic activity and cytotoxicity. Truncating the carboxy-terminus of SLT-1A, StxA, or SLT-2A to amino acids 1-251 removes two predicted B-cell epitope regions, two predicted CD4 positive (CD4+) T-cell epitopes, and a predicted discontinuous B-cell epitope. Truncating the amino-terminus of SLT-1A, StxA, or SLT-2A to 75-293 removes at least three predicted B-cell epitope regions and three predicted CD4+ T-cell epitopes. Truncating both amino- and carboxy-terminals of SLT-1A, StxA, or SLT-2A to 75-251 deletes at least five predicted B-cell epitope regions, four putative CD4+ T-cell epitopes and one predicted discontinuous B-cell epitope.

[0254] In some embodiments, a de-immunized, Shiga toxin effector polypeptide may comprise or consist essentially of a full-length or truncated Shiga toxin A Subunit with at least one mutation (relative to a wild-type Shiga toxin polypeptide), e.g. deletion, insertion, inversion, or substitution, in a provided, endogenous, B-cell and/or CD4+ T-cell epitope region. In some embodiments, the Shiga toxin effector polypeptide comprises a disruption which comprises a mutation (relative to a wild-type Shiga toxin polypeptide) which includes a deletion of at least one amino acid residue within the endogenous, B-cell and/or CD4+ T-cell epitope region. In some embodiments, the Shiga toxin effector polypeptide comprises a disruption which comprises an insertion of at least one amino acid residue within the endogenous, B-cell and/or CD4+ T-cell epitope region. In some embodiments, the Shiga toxin effector polypeptide comprises a disruption which comprises an inversion of amino acid residues, wherein at least one inverted amino acid residue is within the endogenous, B-cell and/or CD4+ T-cell epitope region. In some embodiments, the Shiga toxin effector polypeptide comprises a disruption which comprises a mutation (relative to a wild-type Shiga toxin polypeptide), such as, e.g., an amino acid substitution, an amino acid substitution to a non-standard amino acid, and/or an amino acid residue with a chemically modified side chain. Non-limiting examples of de-immunized, Shiga toxin effector sub-regions are described in WO 2015/113005, WO 2015/113007, WO 2015/191764, WO 2016/196344, and WO 2018/140427.

[0255] In other embodiments, the de-immunized, Shiga toxin effector polypeptide comprises a truncated Shiga toxin A Subunit which is shorter than a full-length Shiga toxin A Subunit wherein at least one amino acid residue is disrupted in a natively positioned, B-cell and/or CD4+ T-cell epitope region.

[0256] To create a de-immunized, Shiga toxin effector polypeptide, in principle modifying any amino acid residue in a provided epitope region by various means can result in a disruption of an epitope, such as, e.g., a modification which represents a deletion, insertion, inversion, rearrangement, substitution, and chemical modification of a side chain relative to a wild-type Shiga toxin polypeptide. However, modifying certain amino acid residues and using certain amino acid modifications are more likely to successfully reduce antigenicity and/or immunogenicity while maintaining a certain level of a Shiga toxin effector function(s). For example, terminal truncations and internal amino acid substitutions are preferred because these types of modifications maintain the overall spacing of the amino acid residues in a Shiga toxin effector polypeptide and thus are more likely to maintain Shiga toxin effector polypeptide structure and function.

[0257] In some embodiments, the de-immunized, Shiga toxin effector polypeptide comprises or consists essentially of amino acids 75 to 251 of SLT-1A (SEQ ID NO:1), StxA (SEQ ID NO:2), and/or SLT-2A (SEQ ID NO:3) wherein at least one amino acid residue is disrupted in a natively positioned, epitope region. In some embodiments, a de-immunized, Shiga toxin effector polypeptide comprises or consists essentially of amino acids 1 to 241 of SLT-1A (SEQ ID NO:1), StxA (SEQ ID NO:2), and/or SLT-2A (SEQ ID NO:3) wherein at least one amino acid residue is disrupted in a natively positioned, epitope region. Some embodiments are de-immunized, Shiga toxin effector polypeptides which comprise or consist essentially of amino acids 1 to 251 of SLT-1A (SEQ ID NO:1), StxA (SEQ ID NO:2), and/or SLT-2A (SEQ ID NO:3) wherein at least one amino acid residue is disrupted in a natively positioned, epitope region provided. Some embodiments are Shiga toxin effector polypeptides comprising amino acids 1 to 261 of SLT-1A (SEQ ID NO:1), StxA (SEQ ID NO:2), and/or SLT-2A (SEQ ID NO:3) wherein at least one amino acid residue is disrupted in a natively positioned, epitope region.

[0258] There are numerous, diverse, internal amino acid substitutions that can be used to create de-immunized, Shiga toxin effector polypeptides. Of the possible substitute amino acids to use within an epitope region, the following substitute amino acid residues are predicted to be the most likely to reduce the antigenicity and/or immunogenicity of an epitope—G, D, E, S, T, R, K, and H. Except for glycine, these amino acid residues may all be classified as polar and/or charged residues. Of the possible amino acids to substitute with, the following amino acids A, G, V, L, I, P, C, M, F, S, D, N, Q, H, and K are predicted to be the most likely to reduce antigenicity and/or immunogenicity while providing the retention of a significant level of a Shiga toxin effector function(s), depending on the amino acid substituted for. Generally, the substitution should change a polar and/or charged amino acid residue to a non-polar and uncharged residue (see e.g. WO 2015/113007). In addition, it may be beneficial to epitope disruption to reduce the overall size and/or length of the amino acid residue's R-group functional side chain (see e.g. WO 2015/113007). However despite these generalities of substitutions most likely to confer epitope disruption, because the aim is to preserve significant Shiga toxin effector function(s), the substitute amino acid might be more likely to preserve Shiga toxin effector function(s) if it resembles the amino acid substituted for, such as, e.g., a nonpolar and/or uncharged residue of similar size substituted for a polar and/or charged residue.

[0259] In WO 2015/113007, many mutations were empirically tested for effect(s) on the Shiga toxin effector function of various Shiga toxin effector polypeptides and PD-L1 targeting molecules. Table 2 summarizes the results described in WO 2015/113007 and WO 2016/196344 where an amino acid substitution, alone or in combination with one or more other substitutions, did not prevent the exhibition of a potent level of a Shiga toxin effector function(s). Table 2 uses the epitope region numbering scheme described in WO 2016/196344.

TABLE 2
Amino Acid Substitutions in Shiga Toxin Effector Polypeptides

| | natively positioned amino acid positions | | |
|---|---|---|---|
| Epitope Region | | B-Cell Epitope | T-Cell |
| Disrupted | Substitution | Region | Epitope |
| 1 | K1A | 1-15 | |
| 1 | K1M | 1-15 | |
| 1 | T4I | 1-15 | 4-33 |
| 1 | D6R | 1-15 | 4-33 |
| 1 | S8I | 1-15 | 4-33 |
| 1 | T9V | 1-15 | 4-33 |
| 1 | T9I | 1-15 | 4-33 |
| 1 | K11A | 1-15 | 4-33 |
| 1 | K11H | 1-15 | 4-33 |
| 1 | T12K | 1-15 | 4-33 |
| 2 | S33I | 27-37 | 4-33 |
| 2 | S33C | 27-37 | 4-33 |
| 3 | S43N | 39-48 | 34-78 |
| 3 | G44L | 39-48 | 34-78 |
| 3 | T45V | 39-48 | 34-78 |
| 3 | T45I | 39-48 | 34-78 |
| 3 | S45V | 39-48 | 34-78 |
| 3 | S45I | 39-48 | 34-78 |
| 3 | G46P | 39-48 | 34-78 |
| 3 | D47G | 39-48 | 34-78 |
| 3 | D47M | 39-48 | 34-78 |
| 3 | N48V | 39-48 | 34-78 |
| 3 | N48F | 39-48 | 34-78 |
| — | L49A | immunogenic residue | 34-78 |
| — | F50T | | 34-78 |
| — | A51V | | 34-78 |
| 4 | D53A | 53-66 | 34-78 |
| 4 | D53G | 53-66 | 34-78 |
| 4 | D53N | 53-66 | 34-78 |
| 4 | V54L | 53-66 | 34-78 |
| 4 | V54I | 53-66 | 34-78 |
| 4 | R55A | 53-66 | 34-78 |
| 4 | R55V | 53-66 | 34-78 |
| 4 | R55L | 53-66 | 34-78 |
| 4 | G56P | 53-66 | 34-78 |
| 4 | I57M | 53-66 | 34-78 |
| 4 | I57F | 53-66 | 34-78 |
| 4 | D58A | 53-66 | 34-78 |
| 4 | D58V | 53-66 | 34-78 |
| 4 | D58F | 53-66 | 34-78 |
| 4 | P59A | 53-66 | 34-78 |
| 4 | P59F | 53-66 | 34-78 |
| 4 | E60I | 53-66 | 34-78 |
| 4 | E60T | 53-66 | 34-78 |
| 4 | E60R | 53-66 | 34-78 |
| 4 | E61A | 53-66 | 34-78 |
| 4 | E61V | 53-66 | 34-78 |
| 4 | E61L | 53-66 | 34-78 |
| 4 | G62A | 53-66 | 34-78 |
| — | R84A | | 77-103 |
| — | V88A | | 77-103 |
| 5 | D94A | 94-115 | 77-103 |
| 5 | S96I | 94-115 | 77-103 |
| 5 | T104N | 94-115 | |
| 5 | A105L | 94-115 | |
| 5 | T107P | 94-115 | |
| 5 | L108M | 94-115 | |
| 5 | S109V | 94-115 | |
| 5 | G110A | 94-115 | |
| 5 | D111T | 94-115 | |
| 5 | S112V | 94-115 | |
| 6 | D141A | 141-153 | 128-168 |
| 6 | G147A | 141-153 | 128-168 |
| — | V154A | | 128-168 |
| 7 | R179A | 179-190 | 160-183 |
| 7 | T180G | 179-190 | 160-183 |
| 7 | T181I | 179-190 | 160-183 |
| 7 | D183A | 179-190 | 160-183 |
| 7 | D183G | 179-190 | 160-183 |
| 7 | D184A | 179-190 | |
| 7 | D184F | 179-190 | |
| 7 | L185V | 179-190 | |
| 7 | S186A | 179-190 | |
| 7 | S186F | 179-190 | |
| 7 | G187A | 179-190 | |
| 7 | G187T | 179-190 | |
| 7 | R188A | 179-190 | |
| 7 | R188L | 179-190 | |
| 7 | S189A | 179-190 | |
| — | D198A | immunogenic residue | |
| — | R205A | immunogenic residue | |
| — | C242S | | 236-258 |
| 8 | R248A | 243-257 | 236-258 |
| 8 | R251A | 243-257 | 236-258 |

[0260] Based on the empirical evidence in WO 2015/113007 and WO 2016/196344, certain amino acid positions in the A Subunits of Shiga toxins are predicted to tolerate epitope disruptions while still retaining significant Shiga toxin effector functions. For example, the following natively occurring positions tolerate amino acid substitutions, either alone or in combination, while retaining a Shiga toxin effector function(s) such as cytotoxicity—1 of SEQ ID NO:1 or SEQ ID NO:2; 4 of SEQ ID NO:1, SEQ ID NO:2, or SEQ ID NO:3; 8 of SEQ ID NO:1, SEQ ID NO:2, or SEQ ID NO:3; 9 of SEQ ID NO:1, SEQ ID NO:2, or SEQ ID NO:3; 11 of SEQ ID NO:1, SEQ ID NO:2, or SEQ ID NO:3; 33 of SEQ ID NO:1 or SEQ ID NO:2; 43 of SEQ ID NO:1 or SEQ ID NO:2; 44 of SEQ ID NO:1 or SEQ ID NO:2; 45 of SEQ ID NO:1 or SEQ ID NO:2; 46 of SEQ ID NO:1 or SEQ ID NO:2; 47 of SEQ ID NO:1 or SEQ ID NO:2; 48 of SEQ ID NO:1, SEQ ID NO:2, or SEQ ID NO:3; 49 of SEQ ID NO:1 or SEQ ID NO:2; 50 of SEQ ID NO:1 or SEQ ID NO:2; 51 of SEQ ID NO:1 or SEQ ID NO:2; 53 of SEQ ID NO:1 or SEQ ID NO:2; 54 of SEQ ID NO:1 or SEQ ID NO:2; 55 of SEQ ID NO:1 or SEQ ID NO:2; 56 of SEQ ID NO:1 or SEQ ID NO:2; 57 of SEQ ID NO:1 or SEQ ID NO:2; 58 of SEQ ID NO:1, SEQ ID NO:2, or SEQ ID NO:3; 59 of SEQ ID NO:1, SEQ ID NO:2, or SEQ ID NO:3; 60 of SEQ ID NO:1 or SEQ ID NO:2; 61 of SEQ ID NO:1 or SEQ ID NO:2; 62 of SEQ ID NO:1 or SEQ ID NO:2; 84 of SEQ ID NO:1 or SEQ ID NO:2; 88 of SEQ ID NO:1 or SEQ ID NO:2; 94 of SEQ ID NO:1, SEQ ID NO:2, or SEQ ID NO:3; 96 of SEQ ID NO:1, SEQ ID NO:2, or SEQ ID NO:3; 104 of SEQ ID NO:1 or SEQ ID NO:2; 105 of SEQ ID NO:1 or SEQ ID NO:2; 107 of SEQ ID NO:1 or SEQ ID NO:2; 108 of SEQ ID NO:1 or SEQ ID NO:2; 109 of SEQ ID NO:1, SEQ ID NO:2, or SEQ ID NO:3; 110 of SEQ ID NO:1 or SEQ ID NO:2; 111 of SEQ ID NO:1 or SEQ ID NO:2; 112 of SEQ ID NO:1, SEQ ID NO:2, or SEQ ID NO:3; 141 of SEQ ID NO:1 or SEQ ID NO:2; 147 of SEQ ID NO:1, SEQ ID NO:2, or SEQ ID NO:3; 154 of SEQ ID NO:1 or SEQ ID NO:2; 179 of SEQ ID NO:1, SEQ ID NO:2, or SEQ ID NO:3; 180 of SEQ ID NO:1 or SEQ ID NO:2; 181 of SEQ ID NO:1 or SEQ ID NO:2; 183 of SEQ ID NO:1, SEQ ID NO:2, or SEQ ID NO:3; 184 of SEQ ID NO:1, SEQ ID NO:2, or SEQ ID NO:3; 185 of SEQ ID NO:1 or SEQ ID NO:2; 186 of SEQ ID NO:1, SEQ ID NO:2, or SEQ ID NO:3; 187 of SEQ ID NO:1 or SEQ ID NO:2; 188 of SEQ ID NO:1 or SEQ ID NO:2; 189 of SEQ ID NO:1 or SEQ ID NO:2; 198 of SEQ ID NO:1 or SEQ ID NO:2; 204 of SEQ ID NO:3; 205 of SEQ ID NO:1 or SEQ ID NO:2; 241 of SEQ ID NO:3; 242 of SEQ ID NO:1 or SEQ ID NO:2; 247 of SEQ ID NO:1 or SEQ ID NO:2; 247 of SEQ ID NO:3; 248 of SEQ ID NO:1 or SEQ ID NO:2; 250 of SEQ ID NO:3; 251 of SEQ ID NO:1 or SEQ ID NO:2; 264 of SEQ ID NO:1, SEQ ID NO:2, or SEQ ID NO:3; 265 of SEQ ID NO:1 or SEQ ID NO:2; and 286 of SEQ ID NO:1 or SEQ ID NO:2.

[0261] The empirical data in WO 2015/113007 and WO 2016/196344 point towards other epitope disrupting substitutions and combinations of epitope disrupting substitutions that can reduce antigenicity and/or immunogenicity of a Shiga toxin effector polypeptide while retaining the ability of the Shiga toxin effector polypeptide to exhibit a significant Shiga toxin effector function such as, e.g., new combinations of the aforementioned truncations and positions tolerating substitutions as well as new substitutions at identical positions or conserved positions in related Shiga toxin A Subunits.

[0262] It is predictable that other amino acid substitutions to amino acid residues of a conservative functional group of a substitution tested herein may reduce antigenicity and/or immunogenicity while preserving a significant Shiga toxin effector function. For example, other substitutions known to the skilled worker to be similar to any of K1A, K1M, T4I, D6R, S8I, T8V, T9I, S9I, K11A, K11H, T12K, S33I, S33C, S43N, G44L, S45V, S45I, T45V, T45I, G46P, D47M, D47G, N48V, N48F, L49A, F50T, A51V, D53A, D53N, D53G, V54L, V54I, R55A, R55V, R55L, G56P, I57F, I57M, D58A, D58V, D58F, P59A, P59F, E60I, E60T, E60R, E61A, E61V, E61L, G62A, R84A, V88A, D94A, S96I, T104N, A105L, T107P, L108M, S109V, T109V, G110A, D111T, S112V, D141A, G147A, V154A, R179A, T180G, T181I, D183A, D183G, D184A, D184A, D184F, L185V, L185D, S186A, S186F, G187A, G187T, R188A, R188L, S189A, D198A, R204A, R205A, C242S, S247I, Y247A, R248A, R250A, R251A, or D264A, G264A, T286A, and/or T286I may disrupt an endogenous epitope while maintaining at least one Shiga toxin effector function. In particular, amino acid substitutions to conservative amino acid residues similar to K1A, T4I, S8I, T8V, T9I, S9I, K11A, K11H, S33I, S33C, S43N, G44L, S45V, S45I, T45V, T45I, G46P, D47M, N48V, N48F, L49A, A51V, D53A, D53N, V54L, V54I, R55A, R55V, R55L, G56P, I57F, I57M, D58A, D58V, D58F, P59A, E60I, E60T, E61A, E61V, E61L, G62A, R84A, V88A, D94A, S96I, T104N, T107P, L108M, S109V, T109V, G110A, D111T, S112V, D141A, G147A, V154A, R179A, T180G, T181I, D183A, D183G, D184A, D184F, L185V, S186A, S186F, G187A, R188A, R188L, S189A, D198A, R204A, R205A, C242S, S247I, Y247A, R248A, R250A, R251A, D264A, G264A, T286A, and T286I may have the same or similar effects. In some embodiments, a Shiga toxin effector polypeptide may comprise similar conservative amino acid substitutions to empirically tested ones, such as, e.g., K1 to G, V, L, I, F, and H; T4 to A, G, V, L, F, M, and S; S8 to A, G, V, L, F, and M; T9 to A, G, L, F, M, and S; S9 to A, G, L, I, F, and M; K11 to G, V, L, I, F, and M; S33 to A, G, V, L, F, and M; S43 to A, G, V, L, I, F, and M; S45 to A, G, L, F, and M; T45 to A, G, L, F, and M; D47 to A, V, L, I, F, S, and Q; N48 to A, G, L, and M; L49 to G; Y49 to A; D53 to V, L, I, F, S, and Q; R55 to G, I, F, M, Q, S, K, and H; D58 to G, L, I, S, and Q; P59 to G; E60 to A, G, V, L, F, S, Q, N, D, and M; E61 to G, I, F, S, Q, N, D, M, and R; R84 to G, V, L, I, F, M, Q, S, K, and H; V88 to G; I88 to G; D94 to G, V, L, I, F, S, and Q; S96 to A, G, V, L, F, and M; T107 to A, G, V, L, I, F, M, and S; S107 to A, G, V, L, I, F, and M; S109 to A, G, I, L, F, and M; T109 to A, G, I, L, F, M, and S; S112 to A, G, L, I, F, and M; D141 to V, L, I, F, S, and Q; V154 to G; R179 to G, V, L, I, F, M, Q, S, K, and H; T180 to A, V, L, I, F, M, and S; T181 to A, G, V, L, F, M, and S; D183 to V, L, I, F, S, and Q; D184 to G, V, L, I, S, and Q; S186 to G, V, I, L, and M; R188 to G, V, I, F, M, Q, S, K, and H; S189 to G, V, I, L, F, and M; D197 to V, L, I, F, S, and Q; D198 to A, V, L, I, F, S, and Q; R204 to G, V, L, I, F, M, Q, S, K, and H; R205 to G, V, L, I, F, M, Q, S, K and H; S247 to A, G, V, I, L, F, and M; Y247 to A, G, V, L, I, F, and M; R248 to G, V, L, I, F, M, Q, S, K, and H; R250 to G, V, L, I, F, M, Q, S, K, and H; R251 to G, V, L, I, F, M, Q, S, K, and H; D264 to A, G, V, L, I, F, S, and Q; and T286 to A, G, V, L, I, F, M, and S.

[0263] Similarly, amino acid substitutions which remove charge, polarity, and/or reduce side chain length can disrupt an epitope while maintaining at least one Shiga toxin effector function. In some embodiments, a Shiga toxin effector polypeptide may comprise one or more epitopes disrupted by substitutions such that side chain charge is removed, polarity is removed, and/or side chain length is reduced such as, e.g., substituting the appropriate amino acid selected from the following group A, G, V, L, I, P, C, M, F, S, D, N, Q, H, or K for the amino acid residue at position 1 of SEQ ID NO:1 or SEQ ID NO:2; 4 of SEQ ID NO:1, SEQ ID NO:2, or SEQ ID NO:3; 6 of SEQ ID NO:1 or SEQ ID NO:2; 8 of SEQ ID NO:1, SEQ ID NO:2, or SEQ ID NO:3; 9 of SEQ ID NO:1, SEQ ID NO:2, or SEQ ID NO:3; 11 of SEQ ID NO:1, SEQ ID NO:2, or SEQ ID NO:3; 12 of SEQ ID NO:1, SEQ ID NO:2, or SEQ ID NO:3; 33 of SEQ ID NO:1 or SEQ ID NO:2; 43 of SEQ ID NO:1 or SEQ ID NO:2; 44 of SEQ ID NO:1 or SEQ ID NO:2; 45 of SEQ ID NO:1 or SEQ ID NO:2; 46 of SEQ ID NO:1 or SEQ ID NO:2; 47 of SEQ ID NO:1 or SEQ ID NO:2; 48 of SEQ ID NO:1, SEQ ID NO:2, or SEQ ID NO:3; 49 of SEQ ID NO:1 or SEQ ID NO:2; 50 of SEQ ID NO:1 or SEQ ID NO:2; 51 of SEQ ID NO:1 or SEQ ID NO:2; 53 of SEQ ID NO:1 or SEQ ID NO:2; 54 of SEQ ID NO:1 or SEQ ID NO:2; 55 of SEQ ID NO:1 or SEQ ID NO:2; 56 of SEQ ID NO:1 or SEQ ID NO:2; 57 of SEQ ID NO:1, SEQ ID NO:2, or SEQ ID NO:3; 58 of SEQ ID NO:1, SEQ ID NO:2, or SEQ ID NO:3; 59 of SEQ ID NO:1, SEQ ID NO:2, or SEQ ID NO:3; 60 of SEQ ID NO:1 or SEQ ID NO:2; 61 of SEQ ID NO:1 or SEQ ID NO:2; 62 of SEQ ID NO:1 or SEQ ID NO:2; 84 of SEQ ID NO:1 or SEQ ID NO:2; 88 of SEQ ID NO:1, SEQ ID NO:2, or SEQ ID NO:3; 94 of SEQ ID NO:1, SEQ ID NO:2, or SEQ ID NO:3; 96 of SEQ ID NO:1, SEQ ID NO:2, or SEQ ID NO:3; 104 of SEQ ID NO:1 or SEQ ID NO:2; 105 of SEQ ID NO:1 or SEQ ID NO:2; 107 of SEQ ID NO:1, SEQ ID NO:2, or SEQ ID NO:3; 108 of SEQ ID NO:1 or SEQ ID NO:2; 109 of SEQ ID NO:1, SEQ ID NO:2, or SEQ ID NO:3; 110 of SEQ ID NO:1 or SEQ ID NO:2; 111 of SEQ ID NO:1 or SEQ ID NO:2; 112 of SEQ ID NO:1, SEQ ID NO:2, or SEQ ID NO:3; 141 of SEQ ID NO:1 or SEQ ID NO:2; 147 of SEQ ID NO:1, SEQ ID NO:2, or SEQ ID NO:3; 154 of SEQ ID NO:1 or SEQ ID NO:2; 179 of SEQ ID NO:1, SEQ ID NO:2, or SEQ ID NO:3; 180 of SEQ ID NO:1 or SEQ ID NO:2; 181 of SEQ ID NO:1 or SEQ ID NO:2; 183 of SEQ ID NO:1, SEQ ID NO:2, or SEQ ID NO:3; 184 of SEQ ID NO:1, SEQ ID NO:2, or SEQ ID NO:3; 185 of SEQ ID NO:1 or SEQ ID NO:2; 186 of SEQ ID NO:1, SEQ ID NO:2, or SEQ ID NO:3; 187 of SEQ ID NO:1 or SEQ ID NO:2; 188 of SEQ ID NO:1 or SEQ ID NO:2; 189 of SEQ ID NO:1 or SEQ ID NO:2; 197 of SEQ ID NO:3; 198 of SEQ ID NO:1 or SEQ ID NO:2; 204 of SEQ ID NO:3; 205 of SEQ ID NO:1 or SEQ ID NO:2; 241 of SEQ ID NO:3; 242 of SEQ ID NO:1 or SEQ ID NO:2; 247 of SEQ ID NO:1 or SEQ ID NO:2; 247 of SEQ ID NO:3; 248 of SEQ ID NO:1 or SEQ ID NO:2; 250 of SEQ ID NO:3; 251 of SEQ ID NO:1 or SEQ ID NO:2; 264 of SEQ ID NO:1, SEQ ID NO:2, or SEQ ID NO:3; 265 of SEQ ID NO:1 or SEQ ID NO:2; and 286 of SEQ ID NO:1 or SEQ ID NO:2. In some embodiments, a Shiga toxin effector polypeptide may comprise one or more of the following amino acid substitutions: K1 to A, G, V, L, I, F, M and H; T4 to A, G, V, L, I, F, M, and S; D6 to A, G, V, L, I, F, S, and Q; S8 to A, G, V, I, L, F, and M; T8 to A, G, V, I, L, F, M, and S; T9 to A, G, V, I, L, F, M, and S; S9 to A, G, V, L, I, F, and M; K11 to A, G, V, L, I, F, M and H; T12 to A, G, V, I, L, F, M, and S; S33 to A, G, V, L, I, F, and M; S43 to A, G, V, L, I, F, and M; G44 to A and L; S45 to A, G, V, L, I, F, and M; T45 to A, G, V, L, I, F, and M; G46 to A and P; D47 to A, G, V, L, I, F, S, and Q; N48 to A, G, V, L, and M; L49 to A or G; F50; A51 to V; D53 to A, G, V, L, I, F, S, and Q; V54 to A, G, and L; R55 to A, G, V, L, I, F, M, Q, S, K, and H; G56 to A and P; 157 to A, G, M, and F; L57 to A, G, M, and F; D58 to A, G, V, L, I, F, S, and Q; P59 to A, G, and F; E60 to A, G, V, L, I, F, S, Q, N, D, M, and R; E61 to A, G, V, L, I, F, S, Q, N, D, M, and R; G62 to A; D94 to A, G, V, L, I, F, S, and Q; R84 to A, G, V, L, I, F, M, Q, S, K, and H; V88 to A and G; I88 to A, G, and V; D94; S96 to A, G, V, I, L, F, and M; T104 to A, G, V, I, L, F, M, and S; A105 to L; T107 to A, G, V, I, L, F, M, and S; S107 to A, G, V, L, I, F, and M; L108 to A, G, and M; S109 to A, G, V, I, L, F, and M; T109 to A, G, V, I, L, F, M, and S; G110 to A; D111 to A, G, V, L, I, F, S, and Q; S112 to A, G, V, L, I, F, and M; D141 to A, G, V, L, I, F, S, and Q; G147 to A; V154 to A and G; R179 to A, G, V, L, I, F, M, Q, S, K, and H; T180 to A, G, V, L, I, F, M, and S; T181 to A, G, V, L, I, F, M, and S; D183 to A, G, V, L, I, F, S, and Q; D184 to A, G, V, L, I, F, S, and Q; L185 to A, G, and V; S186 to A, G, V, I, L, F, and M; G187 to A; R188 to A, G, V, L, I, F, M, Q, S, K, and H; S189 to A, G, V, I, L, F, and M; D197 to A, G, V, L, I, F, S, and Q; D198 to A, G, V, L, I, F, S, and Q; R204 to A, G, V, L, I, F, M, Q, S, K, and H; R205 to A, G, V, L, I, F, M, Q, S, K and H; C242 to A, G, V, and S; S247 to A, G, V, I, L, F, and M; Y247 to A, G, V, L, I, F, and M; R248 to A, G, V, L, I, F, M, Q, S, K, and H; R250 to A, G, V, L, I, F, M, Q, S, K, and H; R251 to A, G, V, L, I, F, M, Q, S, K, and H; C262 to A, G, V, and S; D264 to A, G, V, L, I, F, S, and Q; G264 to A; and T286 to A, G, V, L, I, F, M, and S.

[0264] In addition, any amino acid substitution in one epitope region of a Shiga toxin effector polypeptide which disrupts an epitope while retaining significant Shiga toxin effector function is combinable with any other amino acid substitution in the same or a different epitope region which disrupts an epitope while retaining significant Shiga toxin effector function to form a de-immunized, Shiga toxin effector polypeptide with multiple epitope regions disrupted while still retaining a significant level of Shiga toxin effector function. In some embodiments, a Shiga toxin effector polypeptide may comprise a combination of two or more of the aforementioned substitutions and/or the combinations of substitutions described in WO 2015/113007, WO 2016/196344, and/or WO 2018/140427.

[0265] Based on work described in WO 2015/113007, WO 2016/196344, and WO 2018/140427, certain amino acid regions in the A Subunits of Shiga toxins are predicted to tolerate epitope disruptions while still retaining significant Shiga toxin effector functions. For example, the epitope regions natively positioned at 1-15, 39-48, 53-66, 55-66, 94-115, 180-190, 179-190, and 243-257 tolerated multiple amino acid substitution combinations simultaneously without compromising Shiga toxin enzymatic activity and cytotoxicity.

### B. Examples of Furin-Cleavage Resistant, Shiga Toxin Effector Polypeptides

[0266] In some embodiments, the Shiga toxin effector polypeptide may comprise a disrupted, furin cleavage site at the carboxy-terminus of a Shiga toxin A1 fragment derived region. In some embodiments, the Shiga toxin effector polypeptide does not comprise any known compensatory structure which may provide furin cleavage proximal to the carboxy-terminus of the Shiga toxin A1 fragment derived region. Non-limiting examples of disrupted and furin cleavage sites are described in WO 2015/191764.

[0267] Certain furin-cleavage site disruptions are indicated herein by reference to specific amino acid positions of native Shiga toxin A Subunit sequences provided in the Sequence Listing (e.g. SEQ ID NOs: 1-18), noting that naturally occurring Shiga toxin A Subunits includes precursor forms containing signal sequences of about 22 amino acids at their amino-terminals which are removed to produce mature Shiga toxin A Subunits and are recognizable to the skilled worker. Further, certain furin-cleavage site disruptions comprising mutations are indicated herein by reference to specific amino acids (e.g. R for an arginine residue) natively present at specific positions within native Shiga toxin A Subunits (e.g. R251 for the arginine residue at position 251 from the amino-terminus) followed by the amino acid with which that residue has been substituted in the particular mutation under discussion (e.g. R251A represents the amino acid substitution of alanine for arginine at amino acid residue 251 from the amino-terminus).

[0268] In some embodiments, the Shiga toxin effector polypeptide comprises a disrupted furin-cleavage site at the carboxy-terminus of a Shiga toxin A1 fragment derived region, and such embodiments are referred to herein as “furin-cleavage resistant” or “protease-cleavage resistant,” Shiga toxin effector polypeptides to describe their property(ies) relative to wild-type, Shiga toxin A Subunits and/or wild-type, Shiga toxin A1 fragment fusion proteins.

[0269] In some embodiments, the protease-cleavage resistant, Shiga toxin effector polypeptide consists essentially of a truncated Shiga toxin A Subunit having two or more mutations.

[0270] In some embodiments, the protease-cleavage resistant, Shiga toxin effector polypeptide comprises the disrupted furin-cleavage site comprising the amino acid residue substitution (relative to a wild-type Shiga toxin polypeptide) of one or both of the arginine residues in the minimal, furin-cleavage site consensus site with A, G, or H. In some embodiments, the protease-cleavage resistant, Shiga toxin effector polypeptide comprises a disruption which comprises an amino acid substitution within a furin-cleavage site, where in the substitution occurs at the natively positioned amino acid selected from the group consisting of: 247 of SEQ ID NO:3, 248 of SEQ ID NO:1 or SEQ ID NO:2, 250 of SEQ ID NO:3, 251 of SEQ ID NO:1 or SEQ ID NO:2, or the equivalent position in a conserved Shiga toxin effector polypeptide and/or non-native Shiga toxin effector polypeptide sequence. In some embodiments, the substitution is to any non-conservative amino acid and the substitution occurs at the natively positioned amino acid residue position. In some embodiments, the mutation comprises an amino acid substitution selected from the group consisting of: R247A, R248A, R250A R251A, or the equivalent position in a conserved Shiga toxin effector polypeptide and/or non-native Shiga toxin effector polypeptide sequence.

[0271] In some embodiments, the protease-cleavage resistant Shiga toxin effector polypeptide comprises the disrupted furin-cleavage site comprising the mutation which is a deletion. In some embodiments, the disrupted furin-cleavage site comprises a mutation which is a deletion of the region natively positioned at 247-252 in StxA (SEQ ID NO:2) and SLT-1A (SEQ ID NO:3), or the region natively positioned at 246-251 in SLT-2A (SEQ ID NO:3); a deletion of the region natively positioned at 244-246 in StxA (SEQ ID NO:2) and SLT-1A (SEQ ID NO:3), or the region natively positioned at 243-245 in SLT-2A (SEQ ID NO:3); or a deletion of the region natively positioned at 253-259 in StxA (SEQ ID NO:2) and SLT-1A (SEQ ID NO:3), or the region natively positioned at 252-258 in SLT-2A (SEQ ID NO:3).

[0272] In some embodiments, the protease-cleavage resistant Shiga toxin effector polypeptide comprises the disrupted furin-cleavage site comprising the mutation which is a carboxy-terminal truncation as compared to a wild-type Shiga toxin A Subunit, the truncation which results in the deletion of one or more amino acid residues within the furin-cleavage site. In some embodiments, the disrupted furin-cleavage site comprises the carboxy-terminal truncation which deletes one or more amino acid residues within the minimal cleavage site R/Y-x-x-R (SEQ ID NO: 159), such as, e.g., for StxA and SLT-1A derived Shiga toxin effector polypeptides, truncations ending at the natively amino acid residue position 250, 249, 248, 247, 246, 245, 244, 243, 242, 241, 240, or less; and for SLT-2A derived Shiga toxin effector polypeptides, truncations ending at the natively amino acid residue position 249, 248, 247, 246, 245, 244, 243, 242, 241, or less. Some embodiments comprise the disrupted furin-cleavage site comprising a combination of any of the aforementioned mutations, where possible.

[0273] In some embodiments, the disrupted furin-cleavage site comprises the mutation(s) that is a partial, carboxy-terminal truncation of the furin-cleavage site; however, certain molecules do not comprise the disrupted furin-cleavage site which is a complete, carboxy-terminal truncation of the entire 20 amino acid residue, furin-cleavage site. For example, certain Shiga toxin effector polypeptides comprise the disrupted furin-cleavage site comprising a partial, carboxy-terminal truncation of the Shiga toxin A1 fragment region up to native position 240 in StxA (SEQ ID NO:2) or SLT-1A (SEQ ID NO:1) but not a carboxy-terminal truncation at position 239 or less. Similarly, certain Shiga toxin effector polypeptides comprise the disrupted furin-cleavage site comprising a partial, carboxy-terminal truncation of the Shiga toxin A1 fragment region up to native position 239 in SLT-2A (SEQ ID NO:3) but not a carboxy-terminal truncation at position 238 or less. In the largest carboxy-terminal truncation of the furin-cleavage resistant, Shiga toxin effector polypeptide, mutations comprising the disrupted furin-cleavage site, positions P14 and P13 of the furin-cleavage site are still present.

[0274] In some embodiments, the disrupted furin-cleavage site comprises both an amino acid residue substitution within the furin-cleavage site and a carboxy-terminal truncation as compared to a wild-type, Shiga toxin A Subunit. In some embodiments, the disrupted furin-cleavage site comprises both an amino acid residue substitution within the minimal furin-cleavage site R/Y-x-x-R (SEQ ID NO: 159) and a carboxy-terminal truncation as compared to a wild-type, Shiga toxin A Subunit, such as, e.g., for StxA and SLT-1A derived Shiga toxin effector polypeptides, truncations ending at the natively amino acid residue position 249, 250, 251, 252, 253, 254, 255, 256, 257, 258, 259, 260, 261, 262, 263, 264, 265, 266, 267, 268, 269, 270, 271, 272, 273, 274, 275, 276, 277, 278, 279, 280, 281, 282, 283, 284, 285, 286, 287, 288, 289, 290, 291, or greater and comprising the natively positioned amino acid residue R248 and/or R251 substituted with any non-positively charged, amino acid residue where appropriate; and for SLT-2A derived Shiga toxin effector polypeptides, truncations ending at the natively amino acid residue position 248, 249, 250, 251, 252, 253, 254, 255, 256, 257, 258, 259, 260, 261, 262, 263, 264, 265, 266, 267, 268, 269, 270, 271, 272, 273, 274, 275, 276, 277, 278, 279, 280, 281, 282, 283, 284, 285, 286, 287, 288, 289, 290, 291, or greater and comprising the natively positioned amino acid residue Y247 and/or R250 substituted with any non-positively charged, amino acid residue where appropriate. In some embodiments, the truncated Shiga toxin effector polypeptide comprising a disrupted furin-cleavage site also comprises the furin-cleavage site, amino acid residues at positions P9, P8, and/or P7 in order to maintain optimal cytotoxicity.

[0275] In some embodiments, the disrupted furin-cleavage site comprises a mutation(s) which is one or more internal, amino acid residue deletions, as compared to a wild-type, Shiga toxin A Subunit. In some embodiments, the disrupted furin-cleavage site comprises a mutation(s) which has one or more amino acid residue deletions within the minimal furin-cleavage site R/Y-x-x-R (SEQ ID NO: 159). For example, StxA and SLT-1A derived Shiga toxin effector polypeptides comprising internal deletions of the natively positioned amino acid residues R248 and/or R251, which may be combined with deletions of surrounding residues such as, e.g., 249, 250, 247, 252, etc.; and SLT-2A derived Shiga toxin effector polypeptides comprising internal deletions of the natively positioned amino acid residues Y247 and/or R250, which may be combined with deletions of surrounding residues such as, e.g., 248, 249, 246, 251, etc. In some embodiments, the disrupted furin-cleavage site comprises a mutation which is a deletion of four, consecutive, amino acid residues which deletes the minimal furin-cleavage site R/Y-x-x-R (SEQ ID NO: 159), such as, e.g., StxA and SLT-1A derived Shiga toxin effector polypeptides lacking R248-R251 and SLT-2A derived Shiga toxin effector polypeptides lacking Y247-R250. In some embodiments, the disrupted furin-cleavage site comprises a mutation(s) having one or more amino acid residue deletions in the amino acid residues flanking the core furin-cleavage site, such as, e.g., a deletion of 244-247 and/or 252-255 in SLT-1A or StxA. In some embodiments, the disrupted furin-cleavage site comprises a mutation which is an internal deletion of the entire surface-exposed, protease-cleavage sensitive loop as compared to a wild-type, Shiga toxin A Subunit, such as, e.g., for StxA and SLT-1A derived Shiga toxin effector polypeptides, a deletion of natively positioned amino acid residues 241-262; and for SLT-2A derived Shiga toxin effector polypeptides, a deletion of natively positioned amino acid residues 240-261.

[0276] In some embodiments, the disrupted furin-cleavage site comprises both a mutation which is an internal, amino acid residue deletion within the furin-cleavage site and a mutation which is carboxy-terminal truncation as compared to a wild-type, Shiga toxin A Subunit. In some embodiments, the disrupted furin-cleavage site comprises both a mutation which is an amino acid residue deletion within the minimal furin-cleavage site R/Y-x-x-R (SEQ ID NO: 159) and a mutation which is a carboxy-terminal truncation as compared to a wild-type, Shiga toxin A Subunit. For example, protease-cleavage resistant, Shiga toxin effector polypeptides may comprise a disrupted furin-cleavage site comprising mutation(s) which are deletions of the natively positioned amino acid residues 248-249 and/or 250-251 in a truncated StxA or SLT-1A polypeptide which still has amino acid residue 247 and/or 252, or the amino acid residues 247-248 and/or 249-250 in a truncated SLT-2A which still has amino acid residue 246 and/or 251. In some embodiments, the disrupted furin-cleavage site comprises a mutation having a deletion of four, consecutive, amino acid residues which deletes the minimal furin-cleavage site R/Y-x-x-R (SEQ ID NO: 159) and a carboxy-terminal truncation as compared to a wild-type, Shiga toxin A Subunit, such as, e.g., for StxA and SLT-1A derived Shiga toxin effector polypeptides, truncations ending at the natively amino acid residue position 252, 253, 254, 255, 256, 257, 258, 259, 260, 261, 262, 263, 264, 265, 266, 267, 268, 269, 270, 271, 272, 273, 274, 275, 276, 277, 278, 279, 280, 281, 282, 283, 284, 285, 286, 287, 288, 289, 290, 291, or greater and lacking R248-R251; and for SLT-2A derived Shiga toxin effector polypeptides, truncations ending at the natively amino acid residue position 251, 252, 253, 254, 255, 256, 257, 258, 259, 260, 261, 262, 263, 264, 265, 266, 267, 268, 269, 270, 271, 272, 273, 274, 275, 276, 277, 278, 279, 280, 281, 282, 283, 284, 285, 286, 287, 288, 289, 290, 291, or greater and lacking Y247-R250.

### C. Examples of Shiga Toxin Effector Polypeptides Having an Embedded Epitope

[0277] In some embodiments, the Shiga toxin effector polypeptide may comprise one or more embedded or inserted, heterologous, T-cell epitopes for purposes of de-immunization and/or delivery to a MHC class I presentation pathway of a target cell. In some embodiments, embedding or partial embedding a T-cell epitope may be preferred over inserting a T-cell epitope because, e.g., embedding-type modifications are more likely to be successful in diverse sub-regions of a Shiga toxin effector polypeptide whereas successful insertions may be more limited to a smaller subset of Shiga toxin effector polypeptide sub-regions. The term “successful” is used here to mean the modification to the Shiga toxin effector polypeptide (e.g. introduction of a heterologous, T-cell epitope) results in a modified Shiga toxin effector polypeptide which retains one or more Shiga toxin effector functions at the requisite level of activity either alone or as a component of a PD-L1 targeting molecule.

[0278] Any of the Shiga toxin effector polypeptide sub-regions described in WO 2015/113007 may be suitable for some embodiments, and any of the Shiga toxin effector polypeptides described in WO 2015/113007 may be modified into a Shiga toxin effector polypeptide of a PD-L1 targeting molecule, e.g., by the addition of one or more new epitope region disruptions for de-immunization (such one as described herein) and/or a furin-cleavage site disruption (such as one described herein).

[0279] In some embodiments, the Shiga toxin effector polypeptide consists essentially of a truncated Shiga toxin A Subunit comprising an embedded or inserted, heterologous, T-cell epitope and one or more other mutations. In some embodiments, the Shiga toxin effector polypeptide comprises an embedded or inserted, heterologous, T-cell epitope and is smaller than a full-length, Shiga toxin A Subunit, such as, e.g., consisting of the polypeptide represent by amino acids 77 to 239 of SLT-1A (SEQ ID NO:1) or StxA (SEQ ID NO:2) or the equivalent in other A Subunits of members of the Shiga toxin family (e.g. amino acids 77 to 238 of SLT-2A (SEQ ID NO:3)). For example, in some embodiments, the Shiga toxin effector polypeptides is derived from amino acids 75 to 251 of SEQ ID NO:1, 1 to 241 of SEQ ID NO:1, 1 to 251 of SEQ ID NO:1, or amino acids 1 to 261 of SEQ ID NO:1, wherein the Shiga toxin effector polypeptide comprises at least one embedded or inserted, heterologous T-cell epitope and at least one amino acid is disrupted in an endogenous, B-cell and/or CD4+ T-cell epitope region and wherein the disrupted amino acid does not overlap with the embedded or inserted epitope. Similarly in other embodiments, the Shiga toxin effector polypeptide is derived from amino acids 75 to 251 of SEQ ID NO:2, 1 to 241 of SEQ ID NO:2, 1 to 251 of SEQ ID NO:2, or amino acids 1 to 261 of SEQ ID NO:2, wherein the Shiga toxin effector polypeptide comprises at least one embedded or inserted, heterologous T-cell epitope and at least one amino acid is disrupted in an endogenous, B-cell and/or CD4+ T-cell epitope region and wherein the disrupted amino acid does not overlap with the embedded or inserted epitope. Additionally, the Shiga toxin effector polypeptide may be derived from amino acids 75 to 251 of SEQ ID NO:3, 1 to 241 of SEQ ID NO:3, 1 to 251 of SEQ ID NO:3, or amino acids 1 to 261 of SEQ ID NO:3, wherein the Shiga toxin effector polypeptide comprises at least one embedded or inserted, heterologous T-cell epitope and at least one amino acid is disrupted in an endogenous, B-cell and/or CD4+ T-cell epitope region and wherein the disrupted amino acid does not overlap with the embedded or inserted epitope. In some embodiments, the Shiga toxin effector polypeptide comprises an embedded or inserted, heterologous, T-cell epitope and a disrupted furin-cleavage site at the carboxy-terminus of a Shiga toxin A1 fragment derived region. For example in some embodiments, the Shiga toxin effector polypeptide is derived from amino acids 75 to 251 of SEQ ID NO:1, 1 to 241 of SEQ ID NO:1, 1 to 251 of SEQ ID NO:1, or amino acids 1 to 261 of SEQ ID NO:1, wherein the Shiga toxin effector polypeptide comprises at least one embedded or inserted, heterologous T-cell epitope and a disrupted furin-cleavage site at the carboxy-terminus of a Shiga toxin A1 fragment derived region. Similarly in other embodiments, the Shiga toxin effector polypeptide is derived from amino acids 75 to 251 of SEQ ID NO:2, 1 to 241 of SEQ ID NO:2, 1 to 251 of SEQ ID NO:2, or amino acids 1 to 261 of SEQ ID NO:2, wherein the Shiga toxin effector polypeptide comprises at least one embedded or inserted, heterologous T-cell epitope and a disrupted furin-cleavage site at the carboxy-terminus of a Shiga toxin A1 fragment derived region. Additionally, the Shiga toxin effector polypeptide may be derived from amino acids 75 to 251 of SEQ ID NO:3, 1 to 241 of SEQ ID NO:3, 1 to 251 of SEQ ID NO:3, or amino acids 1 to 261 of SEQ ID NO:3, wherein the Shiga toxin effector polypeptide comprises at least one embedded or inserted, heterologous T-cell epitope and a disrupted furin-cleavage site at the carboxy-terminus of a Shiga toxin A1 fragment derived region.

### D. Examples of Combination Shiga Toxin Effector Polypeptides

[0280] A combination Shiga toxin effector polypeptide comprises two or more sub-regions (i.e. non-overlapping sub-regions) wherein each sub-region comprises at least one of the following: (1) a disruption in an endogenous epitope or epitope region; (2) an embedded, heterologous, T-cell epitope-peptide; (3) an inserted, heterologous, T-cell epitope-peptide; and (4) a disrupted furin-cleavage site at the carboxy-terminus of an A1 fragment derived region.

[0281] Some embodiments of the combination Shiga toxin effector polypeptides comprise both (1) a disruption in an endogenous epitope or epitope region and (2) a disrupted furin-cleavage site at the carboxy-terminus of an A1 fragment derived region. It is predicted that any of the individual, de-immunized, Shiga toxin effector sub-regions described in WO 2015/113007, WO 2016/196344, and WO 2018/140427 (see e.g. Table 2, supra) may generally be combined with any Shiga toxin effector sub-region comprising a disrupted furin-cleavage site described herein, described in WO 2015/191764, and/or known in the art in order to create a Shiga toxin effector polypeptide for use as a component of a PD-L1 targeting molecule.

[0282] In some embodiments, the Shiga toxin effector polypeptide consists essentially of the polypeptide shown in any one of SEQ ID NOs: 19-21 which further comprises a disruption of at least one, endogenous, B-cell and/or T-cell epitope region which does not overlap with an embedded or inserted, heterologous, CD8+ T-cell epitope; wherein the disruption comprises one or more amino acid residue substitutions relative to a wild-type Shiga toxin. In some embodiments the substitution is selected from the group consisting of: K1 to A, G, V, L, I, F, M and H; T4 to A, G, V, L, I, F, M, and S; D6 to A, G, V, L, I, F, S, Q and R; S8 to A, G, V, I, L, F, and M; T9 to A, G, V, I, L, F, M, and S; S9 to A, G, V, L, I, F, and M; K11 to A, G, V, L, I, F, M and H; T12 to A, G, V, I, L, F, M, S, and K; S12 to A, G, V, I, L, F, and M; S33 to A, G, V, L, I, F, M, and C; S43 to A, G, V, L, I, F, and M; G44 to A or L; S45 to A, G, V, L, I, F, and M; T45 to A, G, V, L, I, F, and M; G46 to A and P; D47 to A, G, V, L, I, F, S, M, and Q; N48 to A, G, V, L, M and F; L49 to A, V, C, and G; Y49 to A, G, V, L, I, F, M, and T; F50 to A, G, V, L, I, and T; A51; D53 to A, G, V, L, I, F, S, and Q; V54 to A, G, I, and L; R55 to A, G, V, L, I, F, M, Q, S, K, and H; G56 to A and P; 157 to A, G, V, and M; L57 to A, V, C, G, M, and F; D58 to A, G, V, L, I, F, S, and Q; P59 to A, G, and F; E60 to A, G, V, L, I, F, S, Q, N, D, M, T, and R; E61 to A, G, V, L, I, F, S, Q, N, D, M, and R; G62 to A; R84 to A, G, V, L, I, F, M, Q, S, K, and H; V88 to A and G; I88 to A, V, C, and G; D94 to A, G, V, L, I, F, S, and Q; S96 to A, G, V, I, L, F, and M; T104 to A, G, V, L, I, F, M; and N; A105 to L; T107 to A, G, V, L, I, F, M, and P; S107 to A, G, V, L, I, F, M, and P; L108 to A, V, C, and G; S109 to A, G, V, I, L, F, and M; T109 to A, G, V, I, L, F, M, and S; G110 to A; S112 to A, G, V, L, I, F, and M; D111 to A, G, V, L, I, F, S, Q, and T; S112 to A, G, V, L, I, F, and M; D141 to A, G, V, L, I, F, S, and Q; G147 to A; V154 to A and G. R179 to A, G, V, L, I, F, M, Q, S, K, and H; T180 to A, G, V, L, I, F, M, and S; T181 to A, G, V, L, I, F, M, and S; D183 to A, G, V, L, I, F, S, and Q; D184 to A, G, V, L, I, F, S, and Q; L185 to A, G, V and C; S186 to A, G, V, I, L, F, and M; G187 to A; R188 to A, G, V, L, I, F, M, Q, S, K, and H; S189 to A, G, V, I, L, F, and M; D198 to A, G, V, L, I, F, S, and Q; R204 to A, G, V, L, I, F, M, Q, S, K, and H; R205 to A, G, V, L, I, F, M, Q, S, K and H; S247 to A, G, V, I, L, F, and M; Y247 to A, G, V, L, I, F, and M; R248 to A, G, V, L, I, F, M, Q, S, K, and H; R250 to A, G, V, L, I, F, M, Q, S, K, and H; R251 to A, G, V, L, I, F, M, Q, S, K, and H; D264 to A, G, V, L, I, F, S, and Q; G264 to A; and T286 to A, G, V, L, I, F, M, and S. In some embodiments, there are multiple disruptions of multiple, endogenous B-cell and/or CD8+ T-cell epitope regions wherein each disruption involves at least one amino acid residue substitution selected from the group consisting of: K1 to A, G, V, L, I, F, M and H; T4 to A, G, V, L, I, F, M, and S; D6 to A, G, V, L, I, F, S, Q and R; S8 to A, G, V, I, L, F, and M; T9 to A, G, V, I, L, F, M, and S; S9 to A, G, V, L, I, F, and M; K11 to A, G, V, L, I, F, M and H; T12 to A, G, V, I, L, F, M, S, and K; S12 to A, G, V, I, L, F, and M; S33 to A, G, V, L, I, F, M, and C; S43 to A, G, V, L, I, F, and M; G44 to A or L; S45 to A, G, V, L, I, F, and M; T45 to A, G, V, L, I, F, and M; G46 to A and P; D47 to A, G, V, L, I, F, S, M, and Q; N48 to A, G, V, L, M and F; L49 to A, V, C, and G; Y49 to A, G, V, L, I, F, M, and T; F50 to A, G, V, L, I, and T; A51; D53 to A, G, V, L, I, F, S, and Q; V54 to A, G, I, and L; R55 to A, G, V, L, I, F, M, Q, S, K, and H; G56 to A and P; 157 to A, G, V, and M; L57 to A, V, C, G, M, and F; D58 to A, G, V, L, I, F, S, and Q; P59 to A, G, and F; E60 to A, G, V, L, I, F, S, Q, N, D, M, T, and R; E61 to A, G, V, L, I, F, S, Q, N, D, M, and R; G62 to A; R84 to A, G, V, L, I, F, M, Q, S, K, and H; V88 to A and G; I88 to A, V, C, and G; D94 to A, G, V, L, I, F, S, and Q; S96 to A, G, V, I, L, F, and M; T104 to A, G, V, L, I, F, M; and N; A105 to L; T107 to A, G, V, L, I, F, M, and P; S107 to A, G, V, L, I, F, M, and P; L108 to A, V, C, and G; S109 to A, G, V, I, L, F, and M; T109 to A, G, V, I, L, F, M, and S; G110 to A; S112 to A, G, V, L, I, F, and M; D111 to A, G, V, L, I, F, S, Q, and T; S112 to A, G, V, L, I, F, and M; D141 to A, G, V, L, I, F, S, and Q; G147 to A; V154 to A and G. R179 to A, G, V, L, I, F, M, Q, S, K, and H; T180 to A, G, V, L, I, F, M, and S; T181 to A, G, V, L, I, F, M, and S; D183 to A, G, V, L, I, F, S, and Q; D184 to A, G, V, L, I, F, S, and Q; L185 to A, G, V and C; S186 to A, G, V, I, L, F, and M; G187 to A; R188 to A, G, V, L, I, F, M, Q, S, K, and H; S189 to A, G, V, I, L, F, and M; D198 to A, G, V, L, I, F, S, and Q; R204 to A, G, V, L, I, F, M, Q, S, K, and H; R205 to A, G, V, L, I, F, M, Q, S, K and H; S247 to A, G, V, I, L, F, and M; Y247 to A, G, V, L, I, F, and M; R248 to A, G, V, L, I, F, M, Q, S, K, and H; R250 to A, G, V, L, I, F, M, Q, S, K, and H; R251 to A, G, V, L, I, F, M, Q, S, K, and H; D264 to A, G, V, L, I, F, S, and Q; G264 to A; and T286 to A, G, V, L, I, F, M, and S.

[0283] In some embodiments, the Shiga toxin effector polypeptide comprises both (1) an embedded or inserted, heterologous, T-cell epitope-peptide and (2) a disrupted furin-cleavage site at the carboxy-terminus of an A1 fragment derived region. Any of the Shiga toxin effector polypeptide sub-regions comprising an embedded or inserted, heterologous, T-cell epitope described in WO 2015/113007 may generally be combined with any protease-cleavage resistant, Shiga toxin effector polypeptide sub-region (e.g., modified, Shiga toxin A Subunit sub-regions described herein, described in WO 2015/191764, and/or known in the art) in order to create a combination, Shiga toxin effector polypeptide which, as a component of a PD-L1 targeting molecule, is both protease-cleavage resistant and capable of delivering a heterologous, T-cell epitope to the MHC class I presentation pathway of a target cell. Non-limiting examples of this type of combination Shiga toxin effector polypeptide are shown in SEQ ID NOs: 19-21.

[0284] Some embodiments of the combination Shiga toxin effector polypeptides comprise both (1) a disruption in an endogenous epitope or epitope region and (2) an embedded, heterologous, T-cell epitope-peptide. However, the Shiga toxin effector sub-regions comprising inserted or embedded, heterologous, T-cell epitopes described herein or in WO 2015/191764 are generally not combinable with every de-immunized, Shiga toxin effector sub-regions described herein, except where empirically shown to be successfully combined such that the resulting combination molecule retained a sufficient level of a Shiga toxin effector function(s). The disclosure herein shows how such embodiments may be made and tested to empirically demonstrate success.

[0285] The term “successful” is used here to mean two or more amino acid residue substitutions in a Shiga toxin effector polypeptide results in a functional feature, such as, e.g., de-immunization, reduced furin-cleavage, and/or ability to deliver an embedded or inserted epitope, while the modified Shiga toxin effector polypeptide retains one or more Shiga toxin effector functions. The approaches and assays described herein show how to design, make and empirically test embodiments, which represent combination, Shiga toxin effector polypeptides and PD-L1 targeting molecules comprising the same.

[0286] The combination, Shiga toxin effector polypeptide may combine the features of their respective sub-regions, such as, e.g., a furin-cleavage site disruption, individual epitope disruptions, and/or a heterologous T-cell epitope cargo, and these combinations sometimes result in Shiga toxin effector polypeptides with synergistic reductions in immunogenicity as compared to the sum of their partially de-immunized sub-regions.

[0287] De-immunized, Shiga toxin effector polypeptides which exhibit no cytotoxicity or reduced cytotoxicity at certain concentrations, e.g. Shiga toxin effector polypeptides comprising R179A, may still be useful as de-immunized, Shiga toxin effector polypeptides for delivering exogenous materials into cells. Similarly, CD8+ T-cell hyper-immunized, Shiga toxin effector polypeptides of the which exhibit no cytotoxicity or reduced cytotoxicity at certain concentrations, e.g. a Shiga toxin effector polypeptide comprising an epitope embedded into its catalytic domain (see e.g. WO 2015/113005: Example 1-F), may still be useful for delivering a T-cell epitope(s) to a desired subcellular compartment of a cell in which the Shiga toxin effector polypeptide is present or as a component of a PD-L1 targeting molecule for delivery of a T-cell epitope(s) into a target cell.

### E. Examples of PD-L1 Targeting Molecules

[0288] The following embodiments describe in more detail certain structures of illustrative cell-target molecules which target cells physically coupled to PD-L1 at a cellular surface, e.g. cells which express PD-L1.

[0289] In some embodiments, the PD-L1 targeting molecule comprises or consists essentially of the polypeptide shown in any one of SEQ ID NOs: 84-166 or 189-256, and optionally the PD-L1 targeting molecule comprises an amino-terminal methionine residue. In some embodiments, the PD-L 1 targeting molecule comprises the sequence of SEQ ID NO: 86, or a sequence at least 80%, at least 85%, at least 90%, at least 95%, or at least 99% identical thereto. In some embodiments, the PD-L1 targeting molecule comprises the sequence of SEQ ID NO: 87, or a sequence at least 80%, at least 85%, at least 90%, at least 95%, or at least 99% identical thereto. In some embodiments, the PD-L1 targeting molecule comprises the sequence of SEQ ID NO: 87 with at least 1, at least 5, at least 10, or at least 20 amino acid mutations. For example, the PD-L1 targeting molecule may comprise the sequence of SEQ ID NO: 87 with 1-5, 1-10, 10-15, 15-20, 20-25, 25-30, or more amino acid mutations. In some embodiments, the PD-L1 targeting molecule comprises the sequence of SEQ ID NO: 86 with at least 1, at least 5, at least 10, or at least 20 amino acid mutations. For example, the PD-L1 targeting molecule may comprise the sequence of SEQ ID NO: 86 with 1-5, 1-10, 10-15, 15-20, 20-25, 25-30, or more amino acid mutations.

[0290] In some embodiments, the PD-L1 targeting molecule comprises a binding region comprising the sequence of SEQ ID NO: 38 and a Shiga toxin effector polypeptide. In some embodiments, the PD-L1 targeting molecule comprises a binding region comprising the sequence of SEQ ID NO: 38 and a Shiga toxin effector polypeptide comprising the sequence of SEQ ID NO: 41.

[0291] In some embodiments, the PD-L1 targeting molecule comprises a binding region and a Shiga toxin effector polypeptide that are covalently coupled via a linker. In some embodiments, the linker comprises the sequence of SEQ ID NO: 175. In some embodiments, the PD-L1 targeting molecule comprises a Shiga toxin effector polypeptide comprising the sequence of SEQ ID NO: 41, a linker, and a binding region comprising the sequence of SEQ ID NO: 38. In some embodiments, the PD-L1 targeting molecule comprises a Shiga toxin effector polypeptide comprising the sequence of SEQ ID NO: 41, a linker comprising the sequence of SEQ ID NO: 175, and a binding region comprising the sequence of SEQ ID NO: 38.

[0292] In some embodiments, the PD-L1 targeting molecule further comprises at least one heterologous CD8+ T-cell epitope. In some embodiments, the at least one heterologous CD8+ T-cell epitope is positioned at or near the C-terminus of the molecule. In some embodiments, the PD-L1 targeting molecule comprises one, two, three, four, five, six, seven, eight, or more copies of the same heterologous CD8+ T-cell epitope. In some embodiments, the PD-L1 targeting molecule coprises one, two, three, four, five, six, seven, eight, or more different heterologous CD8+ T-cell epitopes. In some embodiments, the PD-L1 targeting molecule comprises one copy of a heterologous CD8+ T-cell epitope comprising the sequence of SEQ ID NO: 77. In some embodiments, the PD-L1 targeting molecule comprises two copies of a heterologous CD8+ T-cell epitope comprising the sequence of SEQ ID NO: 77. In some embodiments, the PD-L1 targeting molecule comprises three or more copies of a heterologous CD8+ T-cell epitope comprising the sequence of SEQ ID NO: 77. In some embodiments, the PD-L1 targeting molecule comprises a heterologous CD8+ T-cell epitope having the sequence of SEQ ID NO: 257 or 258. In some embodiments, the PD-L1 targeting molecule comprises one copy of a heterologous CD8+ T-cell epitope comprising the sequence of any noe of SEQ ID NO: 78-83 or 286-288. In some embodiments, the PD-L1 targeting molecule comprises two copies of a heterologous CD8+ T-cell epitope comprising the sequence of any one of SEQ ID NO: 7778-83 or 286-288. In some embodiments, the PD-L1 targeting molecule comprises three or more copies of a heterologous CD8+ T-cell epitope comprising the sequence of any one of SEQ ID NO: 78-83 or 286-288.

[0293] In some embodiments, a PD-L1 targeting molecule comprises a Shiga toxin effector polypeptide, a linker, a binding region, and a heterologous CD8+ T-cell epitope. In some embodiments, a PD-L1 targeting molecule comprises a Shiga toxin effector polypeptide, a linker, a binding region, and a heterologous CD8+ T-cell epitope comprising the sequence of SEQ ID NO: 77. In some embodiments, a PD-L1 targeting molecule comprises a Shiga toxin effector polypeptide, a linker, a binding region, and two copies of a heterologous CD8+ T-cell epitope. In some embodiments, a PD-L1 targeting molecule comprises a Shiga toxin effector polypeptide, a linker, a binding region, and two copies of a heterologous CD8+ T-cell epitope comprising the sequence of SEQ ID NO: 77. In some embodiments, a PD-L1 targeting molecule comprises a Shiga tocin effector polypeptide comprising the sequence of SEQ ID NO: 41, a binding region comprising the sequence of SEQ ID NO: 38, and a heterologous CD8+ T-cell epitope comprising the sequence of SEQ ID NO: 77. In some embodiments, a PD-L1 targeting molecule comprises a Shiga tocin effector polypeptide comprising the sequence of SEQ ID NO: 41, a binding region comprising the sequence of SEQ ID NO: 38, and two copies of a heterologous CD8+ T-cell epitope comprising the sequence of SEQ ID NO: 77. In some embodiments, a PD-L1 targeting molecule comprises a Shiga toxin effector polypeptide comprising the sequence of SEQ ID NO: 41, a linker comprising the sequence of SEQ ID NO: 175, a binding region comprising the sequence of SEQ ID NO: 38, and a heterologous CD8+ T-cell epitope comprising the sequence of SEQ ID NO: 77. In some embodiments, a PD-L1 targeting molecule comprises a Shiga toxin effector polypeptide comprising the sequence of SEQ ID NO: 41, a linker comprising the sequence of SEQ ID NO: 175, a binding region comprising the sequence of SEQ ID NO: 38, and two copies of a heterologous CD8+ T-cell epitope comprising the sequence of SEQ ID NO: 77. In some embodiments, the PD-L1 targeting molecule further comprises a cleavable spacer, such as a cleavable spacer having the sequence of SEQ ID NO: 187.

### Other Structural Variations

[0294] Also contemplated herein is the use fragments, variants, and/or derivatives of the PD-L1 targeting molecules which contain a functional binding site to any extracellular part of a target biomolecule, and even more preferably capable of binding a target biomolecule with high affinity (e.g. as shown by K_{D}). For example, any binding region which binds an extracellular part of a target biomolecule with a dissociation constant (K_{D}) of 10⁻⁵ to 10⁻¹² moles/liter, preferably less than 200 nM, may be substituted for use in making PD-L1 targeting molecules and methods of use thereof.

[0295] The skilled worker will recognize that variations may be made to the Shiga toxin effector polypeptides and PD-L1 targeting molecules, and polynucleotides encoding any of the former, without diminishing their biological activities, e.g., by maintaining the overall structure and function of the Shiga toxin effector polypeptide, such as in conjunction with one or more 1) endogenous epitope disruptions which reduce antigenic and/or immunogenic potential, 2) furin-cleavage site disruptions which reduce proteolytic cleavage, and/or 3) embedded or inserted epitopes which reduce antigenic and/or immunogenic potential or are capable of being delivered to a MHC I molecule for presentation on a cell surface. For example, some modifications may facilitate expression, facilitate purification, improve pharmacokinetic properties, and/or improve immunogenicity. Such modifications are well known to the skilled worker and include, for example, a methionine added at the amino-terminus to provide an initiation site, additional amino acids placed on either terminus to create conveniently located restriction sites or termination codons, and biochemical affinity tags fused to either terminus to provide for convenient detection and/or purification. A common modification to improve the immunogenicity of a polypeptide produced using a non-chordate system (e.g. a prokaryotic cell) is to remove, after the production of the polypeptide, the starting methionine residue, which may be formylated during production, such as, e.g., in a bacterial host system, because, e.g., the presence of N-formylmethionine (fMet) might induce undesirable immune responses in chordates.

[0296] Also contemplated herein is the inclusion of additional amino acid residues at the amino and/or carboxy termini of a PD-L1 targeting molecule, or a proteinaceous component of a PD-L1 targeting molecule, such as sequences for epitope tags or other moieties. The additional amino acid residues may be used for various purposes including, e.g., facilitating cloning, facilitating expression, post-translational modification, facilitating synthesis, purification, facilitating detection, and administration. Non-limiting examples of epitope tags and moieties are chitin binding protein domains, enteropeptidase cleavage sites, Factor Xa cleavage sites, FIAsH tags, FLAG tags, green fluorescent proteins (GFP), glutathione-S-transferase moieties, HA tags, maltose binding protein domains, myc tags, polyhistidine tags, ReAsH tags, strep-tags, strep-tag II, TEV protease sites, thioredoxin domains, thrombin cleavage site, and V5 epitope tags.

[0297] In certain of the above embodiments, the polypeptide sequence of the Shiga toxin effector polypeptides and/or PD-L1 targeting molecules are varied by one or more conservative amino acid substitutions introduced into the polypeptide region(s) as long as all required structural features are still present and the Shiga toxin effector polypeptide is capable of exhibiting any required function(s), either alone or as a component of a PD-L1 targeting molecule. As used herein, the term “conservative substitution” denotes that one or more amino acids are replaced by another, biologically similar amino acid residue. Examples include substitution of amino acid residues with similar characteristics, e.g. small amino acids, acidic amino acids, polar amino acids, basic amino acids, hydrophobic amino acids and aromatic amino acids (see, for example, Table 3). An example of a conservative substitution with a residue normally not found in endogenous, mammalian peptides and proteins is the conservative substitution of an arginine or lysine residue with, for example, ornithine, canavanine, aminoethylcysteine, or another basic amino acid. For further information concerning phenotypically silent substitutions in peptides and proteins see, e.g., Bowie J et al., Science 247: 1306-10 (1990).

TABLE 3
Examples of Conservative Amino Acid
Substitutions

| I | II | III | IV | V | VI | VII | VIII | IX | X | XI | XII | XIII | XIV |
|---|---|---|---|---|---|---|---|---|---|---|---|---|---|
| A | D | H | C | F | N | A | C | F | A | C | A | A | D |
| G | E | K | I | W | Q | G | M | H | C | D | C | C | E |
| P | Q | R | L | Y | S | I | P | W | F | E | D | D | G |
| S | N | | M | | T | L | | Y | G | H | G | E | K |
| T | | | V | | | V | | | H | K | N | G | P |
| | | | | | | | | | I | N | P | H | Q |
| | | | | | | | | | L | Q | S | K | R |
| | | | | | | | | | M | R | T | N | S |
| | | | | | | | | | R | S | V | Q | T |
| | | | | | | | | | T | T | | R | |
| | | | | | | | | | V | | | S | |
| | | | | | | | | | W | | | P | |
| | | | | | | | | | Y | | | T | |

[0298] In the conservative substitution scheme in Table 3, illustrative conservative substitutions of amino acids are grouped by physicochemical properties—I: neutral, hydrophilic; II: acids and amides; III: basic; IV: hydrophobic; V: aromatic, bulky amino acids, VI hydrophilic uncharged, VII aliphatic uncharged, VIII non-polar uncharged, IX cycloalkenyl-associated, X hydrophobic, XI polar, XII small, XIII turn-permitting, and XIV flexible. For example, conservative amino acid substitutions include the following: 1) S may be substituted for C; 2) M or L may be substituted for F; 3) Y may be substituted for M; 4) Q or E may be substituted for K; 5) N or Q may be substituted for H; and 6) H may be substituted for N.

[0299] Additional conservative amino acid substitutions include the following: 1) S may be substituted for C; 2) M or L may be substituted for F; 3) Y may be substituted for M; 4) Q or E may be substituted for K; 5) N or Q may be substituted for H; and 6) H may be substituted for N.

[0300] In some embodiments, the Shiga toxin effector polypeptides and PD-L1 targeting molecules may comprise functional fragments or variants of a polypeptide region described herein that have, at most, 20, 15, 10, 9, 8, 7, 6, 5, 4, 3, 2, or 1 amino acid substitutions compared to a polypeptide sequence recited herein, as long as it (1) comprises at least one embedded or inserted, heterologous T-cell epitope and at least one amino acid is disrupted in an endogenous, B-cell and/or CD4+ T-cell epitope region, wherein the disrupted amino acid does not overlap with the embedded or inserted epitope; (2) comprises at least one embedded or inserted, heterologous T-cell epitope and a disrupted furin-cleavage site at the carboxy-terminus of a Shiga toxin A1 fragment derived region; or (3) comprises a disrupted furin-cleavage site at the carboxy-terminus of a Shiga toxin A1 fragment derived region and comprises at least one amino acid is disrupted in an endogenous, B-cell and/or CD4+ T-cell epitope region, wherein the disrupted amino acid does not overlap with the disrupted furin-cleavage site. Variants of the Shiga toxin effector polypeptides and PD-L1 targeting molecules may also be prepared by changing a polypeptide described herein by altering one or more amino acid residues or deleting or inserting one or more amino acid residues, such as within the binding region or Shiga toxin effector polypeptide region, in order to achieve desired properties, such as changed cytotoxicity, changed cytostatic effects, changed immunogenicity, and/or changed serum half-life. The Shiga toxin effector polypeptides and PD-L1 targeting molecules may further be prepared with or without a signal sequence.

[0301] Accordingly, in some embodiments, the Shiga toxin effector polypeptide comprises or consists essentially of amino acid sequences having at least 55%, at least 60%, at least 65%, at least 70%, at least 75%, at least 80%, at least 85%, at least 90%, at least 95%, at least 97%, at least 98%, or at least 99%, overall sequence identity to a naturally occurring Shiga toxin A Subunit or fragment thereof, such as, e.g., Shiga toxin A Subunit, such as SLT-1A (SEQ ID NO:1), StxA (SEQ ID NO:2), and/or SLT-2A (SEQ ID NO:3), wherein the Shiga toxin effector polypeptide (1) comprises at least one embedded or inserted, heterologous T-cell epitope and at least one amino acid is disrupted in an endogenous, B-cell and/or CD4+ T-cell epitope region, and wherein the disrupted amino acid does not overlap with the embedded or inserted epitope; (2) comprises at least one embedded or inserted, heterologous T-cell epitope and a disrupted furin-cleavage site at the carboxy-terminus of a Shiga toxin A1 fragment derived region; or (3) comprises a disrupted furin-cleavage site at the carboxy-terminus of a Shiga toxin A1 fragment derived region and comprises at least one amino acid is disrupted in an endogenous, B-cell and/or CD4+ T-cell epitope region, and wherein the disrupted amino acid does not overlap with the disrupted furin-cleavage site.

[0302] In some embodiments, the Shiga toxin effector polypeptide has one or more amino acid residues may be mutated, inserted, or deleted in order to increase the enzymatic activity of the Shiga toxin effector polypeptide. In some embodiments, the Shiga toxin effector polypeptide has one or more amino acid residues may be mutated or deleted in order to reduce or eliminate catalytic and/or cytotoxic activity of the Shiga toxin effector polypeptide. For example, the catalytic and/or cytotoxic activity of the A Subunits of members of the Shiga toxin family may be diminished or eliminated by mutation or truncation.

[0303] The cytotoxicity of the A Subunits of members of the Shiga toxin family may be altered, reduced, or eliminated by mutation and/or truncation. The positions labeled tyrosine-77, glutamate-167, arginine-170, tyrosine-114, and tryptophan-203 have been shown to be important for the catalytic activity of Stx, Stx1, and Stx2 (Hovde C et al., Proc Natl Acad Sci USA 85: 2568-72 (1988); Deresiewicz R et al., Biochemistry 31: 3272-80 (1992); Deresiewicz R et al., Mol Gen Genet 241: 467-73 (1993); Ohmura M et al., Microb Pathog 15: 169-76 (1993); Cao C et al., Microbiol Immunol 38: 441-7 (1994); Suhan M, Hovde C, Infect Immun 66: 5252-9 (1998)). Mutating both glutamate-167 and arginine-170 eliminated the enzymatic activity of Slt-I A1 (i.e., SLT-1A1) in a cell-free ribosome inactivation assay (LaPointe P et al., J Biol Chem 280: 23310-18 (2005)). In another approach using de novo expression of Slt-I A1 in the endoplasmic reticulum, mutating both glutamate-167 and arginine-170 eliminated Slt-I A1 fragment cytotoxicity at that expression level (LaPointe P et al., J Biol Chem 280: 23310-18 (2005)). A truncation analysis demonstrated that a fragment of StxA from residues 75 to 268 still retains significant enzymatic activity in vitro (Haddad J et al., J Bacteriol 175: 4970-8 (1993)). A truncated fragment of Slt-I A1 containing residues 1-239 displayed significant enzymatic activity in vitro and cytotoxicity by de novo expression in the cytosol (LaPointe P et al., J Biol Chem 280: 23310-18 (2005)). Expression of a Slt-I A1 fragment truncated to residues 1-239 in the endoplasmic reticulum was not cytotoxic because it could not retrotranslocate to the cytosol (LaPointe P et al., J Biol Chem 280: 23310-18 (2005)).

[0304] The most critical residues for enzymatic activity and/or cytotoxicity in the Shiga toxin A Subunits were mapped to the following residue-positions: asparagine-75, tyrosine-77, tyrosine-114, glutamate-167, arginine-170, arginine-176, and tryptophan-203 among others (Di R et al., Toxicon 57: 525-39 (2011)). In particular, a double-mutant construct of Stx2A containing glutamate-E1 67-to-lysine and arginine-176-to-lysine mutations was completely inactivated; whereas, many single mutations in Stx1 and Stx2 showed a 10-fold reduction in cytotoxicity. Further, truncation of Stx1A to 1-239 or 1-240 reduced its cytotoxicity, and similarly, truncation of Stx2A to a conserved hydrophobic residue reduced its cytotoxicity. The most critical residues for binding eukaryotic ribosomes and/or eukaryotic ribosome inhibition in the Shiga toxin A Subunit have been mapped to the following residue-positions arginine-172, arginine-176, arginine-179, arginine-188, tyrosine-189, valine-191, and leucine-233 among others (McCluskey A et al., PLoS One 7: e31191 (2012). However, certain modification may increase a Shiga toxin functional activity exhibited by a Shiga toxin effector polypeptide. For example, mutating residue-position alanine-231 in Stx1A to glutamate increased Stx1A's enzymatic activity in vitro (Suhan M, Hovde C, Infect Immun 66: 5252-9 (1998)).

[0305] In some embodiments, the Shiga toxin effector polypeptide derived from SLT-1A (SEQ ID NO:1) or StxA (SEQ ID NO:2) has one or more amino acid residues mutated include substitution of the asparagine at position 75, tyrosine at position 77, tyrosine at position 114, glutamate at position 167, arginine at position 170, arginine at position 176, and/or substitution of the tryptophan at position 203. Examples of such substitutions will be known to the skilled worker based on the prior art, such as asparagine at position 75 to alanine, tyrosine at position 77 to serine, substitution of the tyrosine at position 114 to serine, substitution of the glutamate position 167 to glutamate, substitution of the arginine at position 170 to alanine, substitution of the arginine at position 176 to lysine, substitution of the tryptophan at position 203 to alanine, and/or substitution of the alanine at 231 with glutamate. Other mutations which either enhance or reduce Shiga toxin enzymatic activity and/or cytotoxicity are contemplated herein and may be determined using well known techniques and assays disclosed herein.

[0306] The Shiga toxin effector polypeptides and PD-L1 targeting molecules may optionally be conjugated to one or more additional agents, which may include therapeutic agents, diagnostic agents, and/or other additional exogenous materials known in the art, including such agents as described herein. In some embodiments, the Shiga toxin effector polypeptide or PD-L1 targeting molecule is PEGylated or albuminated, such as, e.g., to provide de-immunization, disrupt furin-cleavage by masking the extended loop and/or the furin-cleavage site at the carboxy-terminus of a Shiga toxin A1 fragment derived region, improve pharmacokinetic properties, and/or improve immunogenicity (see e.g., Wang Q et al., Cancer Res 53: 4588-94 (1993); Tsutsumi Y et al., Proc Natl Acad Sci USA 97: 8548-53 (2000); Buse J, El-Aneed A, Nanomed 5: 1237-60 (2010); Lim S et al., J Control Release 207-93 (2015)).

### IV. General Functions of the PD-L1 Targeting Molecules

[0307] The PD-L1 targeting molecules are useful in diverse applications involving, e.g., cell-killing; cell growth inhibition; intracellular, cargo delivery; biological information gathering; immune response stimulation, and/or remediation of a health condition. The PD-L1 targeting molecules are useful as therapeutic and/or diagnostic molecules, such as, e.g., as cell-targeting, cytotoxic, therapeutic molecules; cell-targeting, nontoxic, delivery vehicles; and/or cell-targeting, diagnostic molecules; for examples in applications involving the in vivo targeting of specific cell types for the diagnosis or treatment of a variety of diseases, including cancers, immune disorders, and microbial infections.

[0308] In some embodiments, the PD-L1 targeting molecules are capable of binding an extracellular part of PD-L1 molecules associated with cell surfaces of particular cell types and entering those cells. Once internalized within a targeted cell type, the PD-L1 targeting molecules may, in some embodiments, be capable of routing an enzymatically active, cytotoxic, Shiga toxin effector polypeptide fragment into the cytosol of the target cell and eventually killing the cell. Alternatively, nontoxic or reduced-toxicity variants of the PD-L1 targeting molecules may be used to deliver additional exogenous materials into target cells, such as epitopes, peptides, proteins, polynucleotides, and detection-promoting agents. This system is modular, in that any number of diverse Shiga toxin effector polypeptides may be associated with a PD-L1 binding region(s) to produce variants of the PD-L1 targeting molecule with different functional characterstics, such as, e.g. de-immunized effectors for applications involving administration of the PD-L1 targeting molecule to a chordate, reduced protease-cleavage sensitive effectors to improve stability particularly in vivo, and effectors comprising a CD8+ T-cell epitope for immunotherapy applications.

PD-L1 Targeting Molecules Comprising a Wild-Type Shiga Toxin Effector Polypeptide and Optionally a Disrupted, Furin-Cleavage Site and/or a Carboxy-Terminal Endoplasmic Reticulum Retention/Retrieval Signal Motif

[0309] In some embodiments, PD-L1 targeting molecules are provided that each comprise (i) a binding region capable of specifically binding an extracellular part of a PD-L1 target molecule, (ii) a Shiga toxin effector polypeptide consisting essentially of a wild-type amino acid sequence (see e.g. WO 2014164693, WO 2015/138435, WO 2015/138452, WO 2017/019623).

[0310] In some embodiments, the PD-L1 targeting molecule comprises a Shiga toxin effector polypeptide comprising (iii) a disrupted furin-cleavage site at the carboxy-terminus of its Shiga toxin A1 fragment region (see e.g. WO 2015191764). For some embodiments, the PD-L1 targeting molecule is capable of one or more the following: entering a cell, inhibiting a ribosome function, causing cytostasis, and/or causing cell death. For some embodiments, the PD-L1 targeting molecule is capable when introduced to cells of exhibiting a cytotoxicity comparable or better than a reference molecule, such as, e.g., a molecule similar to the PD-L1 targeting molecule except for all of its Shiga toxin effector polypeptide components comprise a wild-type Shiga toxin furin-cleavage site at the carboxy terminus of its A1 fragment region.

[0311] In some embodiments, the disrupted furin-cleavage site comprises one or more mutations, relative to a wild-type Shiga toxin A Subunit, the mutation altering at least one amino acid residue in a region natively positioned at 248-251 of the A Subunit of Shiga toxin (SEQ ID NOs: 1-2 and 4-6), or at 247-250 of the A Subunit of Shiga-like toxin 2 (SEQ ID NOs: 3 and 7-18), or the equivalent region in a Shiga toxin A Subunit or derivative thereof. In some embodiments, the disrupted furin-cleavage site comprises one or more mutations, relative to a wild-type Shiga toxin A Subunit, in a minimal furin cleavage site of the furin-cleavage site. In some embodiments the minimal furin cleavage site is represented by the consensus amino acid sequence R/Y-x-x-R (SEQ ID NO: 159) and/or R-x-x-R (SEQ ID NO: 160).

[0312] In some embodiments, the disrupted furin-cleavage site comprises an amino acid residue substitution in the furin-cleavage site relative to a wild-type Shiga toxin A Subunit. In some embodiments, the substitution of the amino acid residue in the furin-cleavage site is of an arginine residue with a non-positively charged, amino acid residue selected from the group consisting of: alanine, glycine, proline, serine, threonine, aspartate, asparagine, glutamate, glutamine, cysteine, isoleucine, leucine, methionine, valine, phenylalanine, tryptophan, and tyrosine. In some embodiments, the substitution of the amino acid residue in the furin-cleavage site is of an arginine residue with a histidine.

[0313] In some embodiments, the PD-L1 targeting molecule comprises a molecular moiety located carboxy-terminal to the carboxy-terminus of the Shiga toxin A1 fragment region.

[0314] In some embodiments, the binding region sterically covers the carboxy-terminus of the A1 fragment region.

[0315] In some embodiments, the molecular moiety sterically covers the carboxy-terminus of the A1 fragment region. In some embodiments, the molecular moiety comprises the binding region.

[0316] In some embodiments, the Shiga toxin effector polypeptide is not cytotoxic and the molecular moiety is cytotoxic.

[0317] In some embodiments, the PD-L1 targeting molecule comprises a binding region and/or molecular moiety located carboxy-terminal to the carboxy-terminus of the Shiga toxin A1 fragment region. In some embodiments, the mass of the binding region and/or molecular moiety is at least 4.5 kDa, 6, kDa, 9 kDa, 12 kDa, 15 kDa, 20 kDa, 25 kDa, 28 kDa, 30 kDa, 41 kDa, 50 kDa, 100 kDa, or greater.

[0318] In some embodiments, the PD-L1 targeting molecule comprises a binding region with a mass of at least 4.5 kDa, 6, kDa, 9 kDa, 12 kDa, 15 kDa, 20 kDa, 25 kDa, 28 kDa, 30 kDa, 41 kDa, 50 kDa, 100 kDa, or greater, as long as the PD-L1 targeting molecule retains the appropriate level of the Shiga toxin biological activity noted herein (e.g., cytotoxicity and/or intracellular routing).

[0319] In some embodiments, the binding region is comprised within a relatively large, molecular moiety comprising such as, e.g., a molecular moiety with a mass of at least 4.5 kDa, 6, kDa, 9 kDa, 12 kDa, 15 kDa, 20 kDa, 25 kDa, 28 kDa, 30 kDa, 41 kDa, 50 kDa, 100 kDa, or greater, as long as the PD-L1 targeting molecule retains the appropriate level of the Shiga toxin biological activity noted herein.

[0320] In some embodiments, the PD-L1 targeting molecule is capable when introduced to a chordate of exhibiting improved, in vivo tolerability compared to in vivo tolerability of a reference PD-L1 targeting molecule consisting of the PD-L1 targeting molecule except for all of its Shiga toxin effector polypeptide component(s) each comprise a wild-type Shiga toxin A1 fragment and/or wild-type Shiga toxin furin-cleavage site at the carboxy terminus of its A1 fragment region.

[0321] In some embodiments, the PD-L1 targeting molecule is de-immunized due to the furin-cleavage site disruption (see e.g. WO 2015113007; WO 2016196344). For some embodiments, the PD-L1 targeting molecule is capable of exhibiting less relative antigenicity and/or relative immunogenicity as compared to a reference PD-L1 targeting molecule consisting of the PD-L1 targeting molecule except for the furin-cleavage site is wild-type and/or all the Shiga toxin effector polypeptide components consist of a wild-type Shiga toxin A1 fragment.

[0322] In some embodiments, the PD-L1 targeting molecule comprises (i) a binding region capable of specifically binding an extracellular part of PD-L1, (ii) a Shiga toxin effector polypeptide consisting essentially of a wild-type amino acid sequence. In some embodiments, the PD-L1 targeting molecule further comprises (iii) a carboxy-terminal, endoplasmic reticulum retention/retrieval signal motif (see e.g. WO 2015138435). In some embodiments, the carboxy-terminal endoplasmic reticulum retention/retrieval signal motif is selected from the group consisting of: KDEL (SEQ ID NO: 111), HDEF (SEQ ID NO: 112), HDEL (SEQ ID NO: 113), RDEF (SEQ ID NO:114), RDEL (SEQ ID NO: 115), WDEL (SEQ ID NO: 116), YDEL (SEQ ID NO: 117), HEEF (SEQ ID NO: 118), HEEL (SEQ ID NO: 119), KEEL (SEQ ID NO: 120), REEL (SEQ ID NO: 121), KAEL (SEQ ID NO: 122), KCEL (SEQ ID NO: 123), KFEL (SEQ ID NO: 124), KGEL (SEQ ID NO: 125), KHEL (SEQ ID NO: 126), KLEL (SEQ ID NO: 127), KNEL (SEQ ID NO: 128), KQEL (SEQ ID NO: 129), KREL (SEQ ID NO: 130), KSEL (SEQ ID NO: 131), KVEL (SEQ ID NO: 132), KWEL (SEQ ID NO: 133), KYEL (SEQ ID NO: 134), KEDL (SEQ ID NO: 135), KIEL (SEQ ID NO: 136), DKEL (SEQ ID NO: 137), FDEL (SEQ ID NO: 138), KDEF (SEQ ID NO: 139), KKEL (SEQ ID NO: 140), HADL (SEQ ID NO: 141), HAEL (SEQ ID NO: 142), HIEL (SEQ ID NO: 143), HNEL (SEQ ID NO: 144), HTEL (SEQ ID NO: 145), KTEL (SEQ ID NO: 146), HVEL (SEQ ID NO: 147), NDEL (SEQ ID NO: 148), QDEL (SEQ ID NO: 149), REDL (SEQ ID NO: 150), RNEL (SEQ ID NO: 151), RTDL (SEQ ID NO: 152), RTEL (SEQ ID NO: 153), SDEL (SEQ ID NO: 154), TDEL (SEQ ID NO: 155), SKEL (SEQ ID NO: 156), STEL (SEQ ID NO: 157), and EDEL (SEQ ID NO: 158).

[0323] In some embodiments, the amino-terminus of the Shiga toxin effector polypeptide is at and/or proximal to an amino-terminus of a polypeptide component of the PD-L1 targeting molecule (see e.g. WO 2015138452; US 2016/0177284). In some embodiments, the binding region is not located proximally to the amino-terminus of the PD-L1 targeting molecule relative to the Shiga toxin effector polypeptide. In some embodiments, the binding region and Shiga toxin effector polypeptide are physically arranged or oriented within the PD-L1 targeting molecule such that the binding region is not located proximally to the amino-terminus of the Shiga toxin effector polypeptide. In some embodiments, the binding region is located within the PD-L1 targeting molecule more proximal to the carboxy-terminus of the Shiga toxin effector polypeptide than to the amino-terminus of the Shiga toxin effector polypeptide.

[0324] In some embodiments, the binding region and Shiga toxin effector polypeptide are linked together, either directly or indirectly.

PD-L1 Targeting Molecules Comprising a Mutation Relvatice to a Wild-Type Shiga Toxin Providing De-Immunization; an Embedded or Inserted, Heterologous, T-Cell Epitope; a Disrupted, Furin-Cleavage Site; and Optionally Comprising a Carboxy-Terminal Endoplasmic Reticulum Retention/Retrieval Signal Motif

[0325] Also provided herein are PD-L1 targeting molecules, each comprising (i) a binding region capable of specifically binding an extracellular part of a PD-L1 target molecule, (ii) a Shiga toxin effector polypeptide comprising one or more mutations relative to a wild-type Shiga toxin amino acid sequence providing de-immunization; an embedded or inserted, heterologous, T-cell epitope; a disrupted, furin-cleavage site; and optionally comprising a carboxy-terminal endoplasmic reticulum retention/retrieval signal motif (see e.g. WO 2016196344, WO 2018/140427).

[0326] In some embodiments, the Shiga toxin effector polypeptide comprises one or more mutations relative to a wild-type Shiga toxin amino acid sequence providing de-immunization, such as, e.g., (a) a mutation disrupting at least one, endogenous, B-cell and/or CD4+ T-cell epitope region; (b) a mutation creating at least one inserted or embedded, heterologous, T-cell epitope; and/or a (c) mutations creating both (i) an embedded or inserted, heterologous, T-cell epitope and (ii) a disruption of at least one, endogenous, B-cell and/or T-cell epitope which does not overlap with the embedded or inserted, heterologous, T-cell epitope.

[0327] In some embodiments, the PD-L1 targeting molecule comprises a molecular moiety associated with the carboxy-terminus of the Shiga toxin effector polypeptide. In some embodiments, the molecular moiety comprises or consists of the binding region. In some embodiments, the molecular moiety comprises at least one amino acid and the Shiga toxin effector polypeptide is linked to at least one amino acid residue of the molecular moiety. In some embodiments, the molecular moiety and the Shiga toxin effector polypeptide are fused forming a continuous polypeptide.

[0328] In some embodiments, the PD-L1 targeting molecule comprises a molecular moiety located carboxy-terminal to the carboxy-terminus of the Shiga toxin A1 fragment region.

[0329] In some embodiments, the PD-L1 targeting molecule further comprises a cytotoxic molecular moiety associated with the carboxy-terminus of the Shiga toxin effector polypeptide. For some embodiments, the cytotoxic molecular moiety is a cytotoxic agent, such as, e.g., a small molecule chemotherapeutic agent, anti-neoplastic agent, cytotoxic antibiotic, alkylating agent, antimetabolite, topoisomerase inhibitor, and/or tubulin inhibitor known to the skilled worker and/or described herein. In some embodiments, the cytotoxic molecular moiety is cytotoxic at concentrations of less than 10,000, 5,000, 1,000, 500, or 200 pM.

[0330] In some embodiments, the Shiga toxin effector polypeptide is not cytotoxic and the molecular moiety is cytotoxic.

[0331] In some embodiments, the PD-L1 targeting molecule and/or its Shiga toxin effector polypeptide is capable of exhibiting subcellular routing efficiency comparable to a reference PD-L1 targeting molecule comprising a wild-type Shiga toxin A1 fragment and lacking a carboxy-terminal, endoplasmic reticulum retention/retrieval signal motif of the KDEL family or wild-type Shiga toxin effector polypeptide.

[0332] In some embodiments, the PD-L1 targeting molecule and/or its Shiga toxin effector polypeptide is capable of exhibiting a significant level of intracellular routing activity to the endoplasmic reticulum and/or cytosol from an endosomal starting location of a cell.

[0333] In some embodiments, the PD-L1 targeting molecule is capable of delivering an embedded or inserted, heterologous, CD8+ T-cell epitope to a MHC class I presentation pathway of a cell for cell-surface presentation of the epitope bound by a MHC class I molecule.

[0334] In some embodiments, the binding region is linked, either directly or indirectly, to the Shiga toxin effector polypeptide by at least one covalent bond which is not a disulfide bond. In some embodiments, the binding region is fused, either directly or indirectly, to the carboxy-terminus of the Shiga toxin effector polypeptide to form a single, continuous polypeptide. In some embodiments, the binding region is an immunoglobulin-type binding region.

[0335] In some embodiments, the disrupted furin-cleavage site comprises one or more mutations in the minimal, furin-cleavage site relative to a wild-type Shiga toxin A Subunit. In some embodiments, the disrupted furin-cleavage site is not an amino-terminal truncation of sequences that overlap with part or all of at least one amino acid residue of the minimal furin-cleavage site. In some embodiments, the mutation in the minimal, furin-cleavage site is an amino acid deletion, insertion, and/or substitution of at least one amino acid residue in the R/Y-x-x-R (SEQ ID NO: 159) furin cleavage site. In some embodiments, the disrupted furin-cleavage site comprises at least one mutation relative to a wild-type Shiga toxin A Subunit, the mutation altering at least one amino acid residue in the region natively positioned 1) at 248-251 of the A Subunit of Shiga toxin (SEQ ID NOs: 1-2 and 4-6), or 2) at 247-250 of the A Subunit of Shiga-like toxin 2 (SEQ ID NOs: 3 and 7-18), or the equivalent amino acid sequence position in any Shiga toxin A Subunit. In some embodiments, the mutation is an amino acid residue substitution of an arginine residue with a non-positively charged, amino acid residue.

[0336] In some embodiments, the PD-L1 targeting molecule is capable, when introduced to cells, of exhibiting cytotoxicity comparable to a cytotoxicity of a reference molecule, such as, e.g., a molecule similar to the PD-L1 targeting molecule except for all of its Shiga toxin effector polypeptide component(s) each comprise a wild-type Shiga toxin A1 fragment.

[0337] In some embodiments, the binding region comprises the peptide or polypeptide shown in any one of SEQ ID NOs: 19-40.

[0338] In some embodiments, the binding region sterically covers the carboxy-terminus of the A1 fragment region.

[0339] In some embodiments, the molecular moiety sterically covers the carboxy-terminus of the A1 fragment region. In some embodiments, the molecular moiety comprises the binding region.

[0340] In some embodiments, the PD-L1 targeting molecule comprises a binding region and/or molecular moiety located carboxy-terminal to the carboxy-terminus of the Shiga toxin A1 fragment region. In some embodiments, the mass of the binding region and/or molecular moiety is at least 4.5 kDa, 6, kDa, 9 kDa, 12 kDa, 15 kDa, 20 kDa, 25 kDa, 28 kDa, 30 kDa, 41 kDa, 50 kDa, 100 kDa, or greater.

[0341] In some embodiments, the PD-L1 targeting molecule comprises a binding region with a mass of at least 4.5 kDa, 6, kDa, 9 kDa, 12 kDa, 15 kDa, 20 kDa, 25 kDa, 28 kDa, 30 kDa, 41 kDa, 50 kDa, 100 kDa, or greater, as long as the PD-L1 targeting molecule retains the appropriate level of the Shiga toxin biological activity noted herein (e.g., cytotoxicity and/or intracellular routing).

[0342] In some embodiments, the binding region is comprised within a relatively large, molecular moiety comprising such as, e.g., a molecular moiety with a mass of at least 4.5 kDa, 6, kDa, 9 kDa, 12 kDa, 15 kDa, 20 kDa, 25 kDa, 28 kDa, 30 kDa, 41 kDa, 50 kDa, 100 kDa, or greater, as long as the PD-L1 targeting molecule retains the appropriate level of the Shiga toxin biological activity noted herein.

[0343] In some embodiments, the amino-terminus of the Shiga toxin effector polypeptide is at and/or proximal to an amino-terminus of a polypeptide component of the PD-L1 targeting molecule. In some embodiments, the binding region is not located proximally to the amino-terminus of the PD-L1 targeting molecule relative to the Shiga toxin effector polypeptide. In some embodiments, the binding region and Shiga toxin effector polypeptide are physically arranged or oriented within the PD-L1 targeting molecule such that the binding region is not located proximally to the amino-terminus of the Shiga toxin effector polypeptide. In some embodiments, the binding region is located within the PD-L1 targeting molecule more proximal to the carboxy-terminus of the Shiga toxin effector polypeptide than to the amino-terminus of the Shiga toxin effector polypeptide. For some embodiments, the PD-L1 targeting molecule is capable when introduced to cells of exhibiting cytotoxicity that is greater than that of a third PD-L1 targeting molecule having an amino-terminus and comprising the binding region and the Shiga toxin effector polypeptide which is not positioned at or proximal to the amino-terminus of the third PD-L1 targeting molecule. For some embodiments, the PD-L1 targeting molecule exhibits cytotoxicity with better optimized, cytotoxic potency, such as, e.g., 4-fold, 5-fold, 6-fold, 9-fold, or greater cytotoxicity as compared to the cytotoxicity of the third PD-L1 targeting molecule. For some embodiments, the cytotoxicity of the PD-L1 targeting molecule to a population of target positive cells is 3-fold, 4-fold, 5-fold, 6-fold, 7-fold, 8-fold, 9-fold, 10-fold or greater than the cytotoxicity of the third PD-L1 targeting molecule to a second population of target positive cells as assayed by CD₅₀ values. In some embodiments, the third PD-L1 targeting molecule does not comprise any carboxy-terminal, endoplasmic reticulum retention/retrieval signal motif of the KDEL family.

[0344] In some embodiments, the amino-terminus of the Shiga toxin effector polypeptide is at and/or proximal to an amino-terminus of a polypeptide component of the PD-L1 targeting molecule. In some embodiments, the binding region is not located proximally to the amino-terminus of the PD-L1 targeting molecule relative to the Shiga toxin effector polypeptide. In some embodiments, the binding region and Shiga toxin effector polypeptide are physically arranged or oriented within the PD-L1 targeting molecule such that the binding region is not located proximally to the amino-terminus of the Shiga toxin effector polypeptide. In some embodiments, the binding region is located within the PD-L1 targeting molecule more proximal to the carboxy-terminus of the Shiga toxin effector polypeptide than to the amino-terminus of the Shiga toxin effector polypeptide. For some embodiments, the PD-L1 targeting molecule is not cytotoxic and is capable, when introduced to cells, of exhibiting a greater subcellular routing efficiency from an extracellular space to a subcellular compartment of an endoplasmic reticulum and/or cytosol as compared to the cytotoxicity of a third PD-L1 targeting molecule having an amino-terminus and comprising the binding region and the Shiga toxin effector polypeptide which is not positioned at or proximal to the amino-terminus of the third PD-L1 targeting molecule. In some embodiments, the third PD-L1 targeting molecule does not comprise any carboxy-terminal, endoplasmic reticulum retention/retrieval signal motif of the KDEL family.

[0345] In some embodiments, the amino-terminus of the Shiga toxin effector polypeptide is at and/or proximal to an amino-terminus of a polypeptide component of the PD-L1 targeting molecule. In some embodiments, the binding region is not located proximally to the amino-terminus of the PD-L1 targeting molecule relative to the Shiga toxin effector polypeptide. In some embodiments, the binding region and Shiga toxin effector polypeptide are physically arranged or oriented within the PD-L1 targeting molecule such that the binding region is not located proximally to the amino-terminus of the Shiga toxin effector polypeptide. In some embodiments, the binding region is located within the PD-L1 targeting molecule more proximal to the carboxy-terminus of the Shiga toxin effector polypeptide than to the amino-terminus of the Shiga toxin effector polypeptide. For some embodiments, the PD-L1 targeting molecule exhibits low cytotoxic potency (i.e. is not capable when introduced to certain positive target cell types of exhibiting a cytotoxicity greater than 1% cell death of a cell population at a PD-L1 targeting molecule concentration of 1000 nM, 500 nM, 100 nM, 75 nM, or 50 nM) and is capable when introduced to cells of exhibiting a greater subcellular routing efficiency from an extracellular space to a subcellular compartment of an endoplasmic reticulum and/or cytosol as compared to the cytotoxicity of a third PD-L1 targeting molecule having an amino-terminus and comprising the binding region and the Shiga toxin effector polypeptide which is not positioned at or proximal to the amino-terminus of the third PD-L1 targeting molecule. In some embodiments, the third PD-L1 targeting molecule does not comprise any carboxy-terminal, endoplasmic reticulum retention/retrieval signal motif of the KDEL family.

[0346] In some embodiments, a PD-L1 targeting molecule, or a polypeptide component thereof, comprises a carboxy-terminal, endoplasmic reticulum retention/retrieval signal motif of a member of the KDEL family. For some embodiments, the carboxy-terminal endoplasmic reticulum retention/retrieval signal motif is selected from the group consisting of: KDEL (SEQ ID NO: 111), HDEF (SEQ ID NO: 112), HDEL (SEQ ID NO: 113), RDEF (SEQ ID NO:114), RDEL (SEQ ID NO: 115), WDEL (SEQ ID NO: 116), YDEL (SEQ ID NO: 117), HEEF (SEQ ID NO: 118), HEEL (SEQ ID NO: 119), KEEL (SEQ ID NO: 120), REEL (SEQ ID NO: 121), KAEL (SEQ ID NO: 122), KCEL (SEQ ID NO: 123), KFEL (SEQ ID NO: 124), KGEL (SEQ ID NO: 125), KHEL (SEQ ID NO: 126), KLEL (SEQ ID NO: 127), KNEL (SEQ ID NO: 128), KQEL (SEQ ID NO: 129), KREL (SEQ ID NO: 130), KSEL (SEQ ID NO: 131), KVEL (SEQ ID NO: 132), KWEL (SEQ ID NO: 133), KYEL (SEQ ID NO: 134), KEDL (SEQ ID NO: 135), KIEL (SEQ ID NO: 136), DKEL (SEQ ID NO: 137), FDEL (SEQ ID NO: 138), KDEF (SEQ ID NO: 139), KKEL (SEQ ID NO: 140), HADL (SEQ ID NO: 141), HAEL (SEQ ID NO: 142), HIEL (SEQ ID NO: 143), HNEL (SEQ ID NO: 144), HTEL (SEQ ID NO: 145), KTEL (SEQ ID NO: 146), HVEL (SEQ ID NO: 147), NDEL (SEQ ID NO: 148), QDEL (SEQ ID NO: 149), REDL (SEQ ID NO: 150), RNEL (SEQ ID NO: 151), RTDL (SEQ ID NO: 152), RTEL (SEQ ID NO: 153), SDEL (SEQ ID NO: 154), TDEL (SEQ ID NO: 155), SKEL (SEQ ID NO: 156), STEL (SEQ ID NO: 157), and EDEL (SEQ ID NO: 158). In some embodiments, the PD-L1 targeting molecule is capable when introduced to cells of exhibiting cytotoxicity that is greater than that of a reference molecule which is consists of the PD-L1 targeting molecule except for it does not comprise any carboxy-terminal, endoplasmic reticulum retention/retrieval signal motif of the KDEL family.

### PD-L1 Targeting Molecules Comprising a De-Immunized Shiga Toxin Effector Polypeptide Comprising an Embedded or Inserted, Heterologous, T-Cell Epitope and a Non-Overlapping De-Immunized Sub-Region

[0347] Also provided herein are PD-L1 targeting molecules, each comprising (i) a binding region capable of specifically binding an extracellular part of a PD-L1 target molecule and (ii) a de-immunized, Shiga toxin effector polypeptide. For example, in some embodiments, the PD-L1 targeting molecule comprises (i) a binding region capable of specifically binding an extracellular part of PD-L1 and (ii) a de-immunized, Shiga toxin effector polypeptide comprising at least one inserted or embedded, heterologous epitope (a) and at least one disrupted, endogenous, B-cell and/or CD4+ T-cell epitope region (b), wherein the heterologous epitope does not overlap with the embedded or inserted, heterologous, T-cell epitope. For some embodiments, the Shiga toxin effector polypeptide is capable of exhibiting at least one Shiga toxin effector function, such as, e.g., directing intracellular routing to the endoplasmic reticulum and/or cytosol of a cell in which the polypeptide is present, inhibiting a ribosome function, enzymatically inactivating a ribosome, causing cytostasis, and/or causing cytotoxicity. In some embodiments, the heterologous, T-cell epitope is a CD8+ T-cell epitope, such as, e.g., with regard to a human immune system. For some embodiments, the heterologous, T-cell epitope is capable of being presented by a MHC class I molecule of a cell. In some embodiments, the PD-L1 targeting molecule is capable of one or more the following: entering a cell, inhibiting a ribosome function, causing cytostasis, causing cell death, and/or delivering the embedded or inserted, heterologous, T-cell epitope to a MHC class I molecule for presentation on a cellular surface. For some embodiments, the PD-L1 targeting molecule is capable when introduced to cells of exhibiting a cytotoxicity comparable or better than a reference molecule, such as, e.g., a PD-L1 targeting molecule consisting of the PD-L1 targeting molecule except for all of its Shiga toxin effector polypeptide component(s) each comprise a wild-type Shiga toxin A1 fragment.

[0348] In some embodiments, the PD-L1 targeting molecule comprises a molecular moiety located carboxy-terminal to the carboxy-terminus of the Shiga toxin A1 fragment region.

[0349] In some embodiments, the PD-L1 targeting molecule is capable when introduced to a chordate of exhibiting improved in vivo tolerability and/or stability compared to a reference molecule, such as, e.g., a PD-L1 targeting molecule consisting of the PD-L1 targeting molecule except for all of its Shiga toxin effector polypeptide component(s) each comprise a wild-type Shiga toxin A1 fragment and/or wild-type Shiga toxin furin-cleavage site at the carboxy terminus of its A1 fragment region. In some embodiments, the Shiga toxin effector polypeptide is not cytotoxic and the molecular moiety is cytotoxic.

[0350] In some embodiments, the binding region and Shiga toxin effector polypeptide are linked together, either directly or indirectly.

[0351] In some embodiments, the PD-L1 targeting molecule is capable of exhibiting (i) a catalytic activity level comparable to a wild-type Shiga toxin A1 fragment or wild-type Shiga toxin effector polypeptide, (ii) a ribosome inhibition activity with a half-maximal inhibitory concentration (IC₅₀) value of 10,000 picomolar or less, and/or (iii) a significant level of Shiga toxin catalytic activity.

[0352] In some embodiments, the PD-L1 targeting molecule and/or its Shiga toxin effector polypeptide is capable of exhibiting subcellular routing efficiency comparable to a reference PD-L1 targeting molecule comprising a wild-type Shiga toxin A1 fragment or wild-type Shiga toxin effector polypeptide and/or capable of exhibiting a significant level of intracellular routing activity to the endoplasmic reticulum and/or cytosol from an endosomal starting location of a cell.

[0353] In some embodiments, whereby administration of the PD-L1 targeting molecule to a cell physically coupled with the extracellular PD-L1 of the PD-L1 targeting molecule's binding region, the PD-L1 targeting molecule is capable of causing death of the cell. In some embodiments, administration of the PD-L1 targeting molecule to two different populations of cell types which differ with respect to the presence or level of the extracellular PD-L1, the PD-L1 targeting molecule is capable of causing cell death to the cell-types physically coupled with an extracellular PD-L1 bound by the cytotoxic PD-L1 targeting molecule's binding region at a CD₅₀ at least three times or less than the CD₅₀ to cell types which are not physically coupled with an extracellular PD-L1 bound by the PD-L1 targeting molecule's binding region. For some embodiments, whereby administration of the PD-L1 targeting molecule to a first populations of cells whose members are physically coupled to extracellular PD-L1 bound by the PD-L1 targeting molecule's binding region, and a second population of cells whose members are not physically coupled to any extracellular PD-L1 bound by the binding region, the cytotoxic effect of the PD-L1 targeting molecule to members of said first population of cells relative to members of said second population of cells is at least 3-fold greater. For some embodiments, whereby administration of the PD-L1 targeting molecule to a first populations of cells whose members are physically coupled to a significant amount of the extracellular PD-L1 bound by the PD-L1 targeting molecule's binding region, and a second population of cells whose members are not physically coupled to a significant amount of any extracellular PD-L1 bound by the binding region, the cytotoxic effect of the PD-L1 targeting molecule to members of said first population of cells relative to members of said second population of cells is at least 3-fold greater. For some embodiments, whereby administration of the PD-L1 targeting molecule to a first population of target biomolecule positive cells, and a second population of cells whose members do not express a significant amount of a target biomolecule of the PD-L1 targeting molecule's binding region at a cellular surface, the cytotoxic effect of the PD-L1 targeting molecule to members of the first population of cells relative to members of the second population of cells is at least 3-fold greater.

[0354] In some embodiments, the PD-L1 targeting molecule is capable when introduced to cells of exhibiting a cytotoxicity with a half-maximal inhibitory concentration (CD₅₀) value of 300 nM or less and/or capable of exhibiting a significant level of Shiga toxin cytotoxicity.

[0355] In some embodiments, the PD-L1 targeting molecule is capable of delivering an embedded or inserted, heterologous, CD8+ T-cell epitope to a MHC class I presentation pathway of a cell for cell-surface presentation of the epitope bound by a MHC class I molecule.

[0356] In some embodiments, the PD-L1 targeting molecule comprises a molecular moiety associated with the carboxy-terminus of the Shiga toxin effector polypeptide. In some embodiments, the molecular moiety comprises or consists of the binding region. In some embodiments, the molecular moiety comprises at least one amino acid and the Shiga toxin effector polypeptide is linked to at least one amino acid residue of the molecular moiety. In some embodiments, the molecular moiety and the Shiga toxin effector polypeptide are fused forming a continuous polypeptide.

[0357] In some embodiments, the PD-L1 targeting molecule further comprises a cytotoxic molecular moiety associated with the carboxy-terminus of the Shiga toxin effector polypeptide. For some embodiments, the cytotoxic molecular moiety is a cytotoxic agent, such as, e.g., a small molecule chemotherapeutic agent, anti-neoplastic agent, cytotoxic antibiotic, alkylating agent, antimetabolite, topoisomerase inhibitor, and/or tubulin inhibitor known to the skilled worker and/or described herein. For some embodiments, the cytotoxic molecular moiety is cytotoxic at concentrations of less than 10,000, 5,000, 1,000, 500, or 200 pM.

[0358] In some embodiments, the disrupted furin-cleavage site comprises one or more mutations in the minimal, furin-cleavage site relative to a wild-type Shiga toxin A Subunit. In some embodiments, the disrupted furin-cleavage site is not an amino-terminal truncation of sequences that overlap with part or all of at least one amino acid residue of the minimal furin-cleavage site. In some embodiments, the mutation in the minimal, furin-cleavage site is an amino acid deletion, insertion, and/or substitution of at least one amino acid residue in the R/Y-x-x-R furin cleavage site (SEQ ID NO: 159). In some embodiments, the disrupted furin-cleavage site comprises at least one mutation relative to a wild-type Shiga toxin A Subunit, the mutation altering at least one amino acid residue in the region natively positioned 1) at 248-251 of the A Subunit of Shiga toxin (SEQ ID NOs: 1-2 and 4-6), or 2) at 247-250 of the A Subunit of Shiga-like toxin 2 (SEQ ID NOs: 3 and 7-18), or the equivalent amino acid sequence position in any Shiga toxin A Subunit. In some embodiments, the mutation is an amino acid residue substitution of an arginine residue with a non-positively charged, amino acid residue.

[0359] In some embodiments, the PD-L1 targeting molecule is capable when introduced to cells of exhibiting cytotoxicity comparable to a cytotoxicity of a reference molecule, such as, e.g., a PD-L1 targeting molecule consisting of the PD-L1 targeting molecule except for all of its Shiga toxin effector polypeptide component(s) each comprise a wild-type Shiga toxin A1 fragment.

[0360] In some embodiments, the binding region comprises the peptide or polypeptide shown in any one of SEQ ID NOs: 19-40.

[0361] In some embodiments, the binding region sterically covers the carboxy-terminus of the A1 fragment region.

[0362] In some embodiments, the molecular moiety sterically covers the carboxy-terminus of the A1 fragment region. In some embodiments, the molecular moiety comprises the binding region.

[0363] In some embodiments, the PD-L1 targeting molecule comprises a binding region and/or molecular moiety located carboxy-terminal to the carboxy-terminus of the Shiga toxin A1 fragment region. In some embodiments, the mass of the binding region and/or molecular moiety is at least 4.5 kDa, 6, kDa, 9 kDa, 12 kDa, 15 kDa, 20 kDa, 25 kDa, 28 kDa, 30 kDa, 41 kDa, 50 kDa, 100 kDa, or greater.

[0364] In some embodiments, the PD-L1 targeting molecule comprises a binding region with a mass of at least 4.5 kDa, 6, kDa, 9 kDa, 12 kDa, 15 kDa, 20 kDa, 25 kDa, 28 kDa, 30 kDa, 41 kDa, 50 kDa, 100 kDa, or greater, as long as the PD-L1 targeting molecule retains the appropriate level of the Shiga toxin biological activity noted herein (e.g., cytotoxicity and/or intracellular routing).

[0365] In some embodiments, the binding region is comprised within a relatively large, molecular moiety comprising such as, e.g., a molecular moiety with a mass of at least 4.5 kDa, 6, kDa, 9 kDa, 12 kDa, 15 kDa, 20 kDa, 25 kDa, 28 kDa, 30 kDa, 41 kDa, 50 kDa, 100 kDa, or greater, as long as the PD-L1 targeting molecule retains the appropriate level of the Shiga toxin biological activity noted herein.

[0366] In some embodiments, the amino-terminus of the Shiga toxin effector polypeptide is at and/or proximal to an amino-terminus of a polypeptide component of the PD-L1 targeting molecule. In some embodiments, the binding region is not located proximally to the amino-terminus of the PD-L1 targeting molecule relative to the Shiga toxin effector polypeptide. In some embodiments, the binding region and Shiga toxin effector polypeptide are physically arranged or oriented within the PD-L1 targeting molecule such that the binding region is not located proximally to the amino-terminus of the Shiga toxin effector polypeptide. In some embodiments, the binding region is located within the PD-L1 targeting molecule more proximal to the carboxy-terminus of the Shiga toxin effector polypeptide than to the amino-terminus of the Shiga toxin effector polypeptide. For some embodiments, the PD-L1 targeting molecule is capable when introduced to cells of exhibiting cytotoxicity that is greater than that of a fourth PD-L1 targeting molecule having an amino-terminus and comprising the binding region and the Shiga toxin effector polypeptide which is not positioned at or proximal to the amino-terminus of the fourth PD-L1 targeting molecule. For some embodiments, the PD-L1 targeting molecule exhibits cytotoxicity with better optimized, cytotoxic potency, such as, e.g., 4-fold, 5-fold, 6-fold, 9-fold, or greater cytotoxicity as compared to the cytotoxicity of the fourth PD-L1 targeting molecule. For some embodiments, the cytotoxicity of the PD-L1 targeting molecule to a population of target positive cells is 3-fold, 4-fold, 5-fold, 6-fold, 7-fold, 8-fold, 9-fold, 10-fold or greater than the cytotoxicity of the fourth PD-L1 targeting molecule to a second population of target positive cells as assayed by CD₅₀ values. In some embodiments, the fourth PD-L1 targeting molecule does not comprise any carboxy-terminal, endoplasmic reticulum retention/retrieval signal motif of the KDEL family.

[0367] In some embodiments, the amino-terminus of the Shiga toxin effector polypeptide is at and/or proximal to an amino-terminus of a polypeptide component of the PD-L1 targeting molecule. In some embodiments, the binding region is not located proximally to the amino-terminus of the PD-L1 targeting molecule relative to the Shiga toxin effector polypeptide. In some embodiments, the binding region and Shiga toxin effector polypeptide are physically arranged or oriented within the PD-L1 targeting molecule such that the binding region is not located proximally to the amino-terminus of the Shiga toxin effector polypeptide. In some embodiments, the binding region is located within the PD-L1 targeting molecule more proximal to the carboxy-terminus of the Shiga toxin effector polypeptide than to the amino-terminus of the Shiga toxin effector polypeptide. For some embodiments, the PD-L1 targeting molecule is not cytotoxic and is capable when introduced to cells of exhibiting a greater subcellular routing efficiency from an extracellular space to a subcellular compartment of an endoplasmic reticulum and/or cytosol as compared to the cytotoxicity of a fourth PD-L1 targeting molecule having an amino-terminus and comprising the binding region and the Shiga toxin effector polypeptide which is not positioned at or proximal to the amino-terminus of the fourth PD-L1 targeting molecule. In some embodiments, the fourth PD-L1 targeting molecule does not comprise any carboxy-terminal, endoplasmic reticulum retention/retrieval signal motif of the KDEL family.

[0368] In some embodiments, the amino-terminus of the Shiga toxin effector polypeptide is at and/or proximal to an amino-terminus of a polypeptide component of the PD-L1 targeting molecule. In some embodiments, the binding region is not located proximally to the amino-terminus of the PD-L1 targeting molecule relative to the Shiga toxin effector polypeptide. In some embodiments, the binding region and Shiga toxin effector polypeptide are physically arranged or oriented within the PD-L1 targeting molecule such that the binding region is not located proximally to the amino-terminus of the Shiga toxin effector polypeptide. In some embodiments, the binding region is located within the PD-L1 targeting molecule more proximal to the carboxy-terminus of the Shiga toxin effector polypeptide than to the amino-terminus of the Shiga toxin effector polypeptide. In some embodiments, the PD-L1 targeting molecule exhibits low cytotoxic potency (i.e. is not capable when introduced to certain positive target cell types of exhibiting a cytotoxicity greater than 1% cell death of a cell population at a PD-L1 targeting molecule concentration of 1000 nM, 500 nM, 100 nM, 75 nM, or 50 nM) and is capable, when introduced to cells, of exhibiting a greater subcellular routing efficiency from an extracellular space to a subcellular compartment of an endoplasmic reticulum and/or cytosol as compared to the cytotoxicity of a fourth PD-L1 targeting molecule having an amino-terminus and comprising the binding region and the Shiga toxin effector polypeptide which is not positioned at or proximal to the amino-terminus of the fourth PD-L1 targeting molecule. In some embodiments, the fourth PD-L1 targeting molecule does not comprise any carboxy-terminal, endoplasmic reticulum retention/retrieval signal motif of the KDEL family.

[0369] In some embodiments, the PD-L1 targeting molecule, or a polypeptide component thereof, comprises a carboxy-terminal, endoplasmic reticulum retention/retrieval signal motif of a member of the KDEL family. For some embodiments, the carboxy-terminal endoplasmic reticulum retention/retrieval signal motif is selected from the group consisting of: KDEL (SEQ ID NO: 111), HDEF (SEQ ID NO: 112), HDEL (SEQ ID NO: 113), RDEF (SEQ ID NO:114), RDEL (SEQ ID NO: 115), WDEL (SEQ ID NO: 116), YDEL (SEQ ID NO: 117), HEEF (SEQ ID NO: 118), HEEL (SEQ ID NO: 119), KEEL (SEQ ID NO: 120), REEL (SEQ ID NO: 121), KAEL (SEQ ID NO: 122), KCEL (SEQ ID NO: 123), KFEL (SEQ ID NO: 124), KGEL (SEQ ID NO: 125), KHEL (SEQ ID NO: 126), KLEL (SEQ ID NO: 127), KNEL (SEQ ID NO: 128), KQEL (SEQ ID NO: 129), KREL (SEQ ID NO: 130), KSEL (SEQ ID NO: 131), KVEL (SEQ ID NO: 132), KWEL (SEQ ID NO: 133), KYEL (SEQ ID NO: 134), KEDL (SEQ ID NO: 135), KIEL (SEQ ID NO: 136), DKEL (SEQ ID NO: 137), FDEL (SEQ ID NO: 138), KDEF (SEQ ID NO: 139), KKEL (SEQ ID NO: 140), HADL (SEQ ID NO: 141), HAEL (SEQ ID NO: 142), HIEL (SEQ ID NO: 143), HNEL (SEQ ID NO: 144), HTEL (SEQ ID NO: 145), KTEL (SEQ ID NO: 146), HVEL (SEQ ID NO: 147), NDEL (SEQ ID NO: 148), QDEL (SEQ ID NO: 149), REDL (SEQ ID NO: 150), RNEL (SEQ ID NO: 151), RTDL (SEQ ID NO: 152), RTEL (SEQ ID NO: 153), SDEL (SEQ ID NO: 154), TDEL (SEQ ID NO: 155), SKEL (SEQ ID NO: 156), STEL (SEQ ID NO: 157), and EDEL (SEQ ID NO: 158). In some embodiments, the PD-L1 targeting molecule is capable when introduced to cells of exhibiting cytotoxicity that is greater than that of a reference PD-L1 targeting molecule consisting of the PD-L1 targeting molecule except for it does not comprise any carboxy-terminal, endoplasmic reticulum retention/retrieval signal motif of the KDEL family. In some embodiments, the PD-L1 targeting molecule is capable of exhibiting a cytotoxicity with better optimized, cytotoxic potency, such as, e.g., 4-fold, 5-fold, 6-fold, 9-fold, or greater cytotoxicity as compared to a reference molecule, such as, e.g. a second PD-L1 targeting molecule comprising the same binding region and Shiga toxin effector polypeptide but wherein the Shiga toxin effector poyleptide is not positioned at or proximal to the amino-terminus of the molecule. In some embodiments, the cytotoxicity of the PD-L1 targeting molecule to a population of target positive cells is 3-fold, 4-fold, 5-fold, 6-fold, 7-fold, 8-fold, 9-fold, 10-fold or greater than the cytotoxicity of the reference PD-L1 targeting molecule to a second population of target positive cells as assayed by CD₅₀ values.

### PD-L1 Targeting Molecules Comprising a Carboxy-Terminal Endoplasmic Reticulum Retention/Retrieval Signal Motif and a Shiga Toxin Effector Polypeptide Comprising an Embedded or Inserted, Heterologous, T-Cell Epitope

[0370] Also provided herein are PD-L1 targeting molecules, each comprising (i) a binding region capable of specifically binding an extracellular part of a PD-L1 target molecule; (ii) a Shiga toxin effector polypeptide comprising an inserted or embedded, heterologous, epitope; and (iii) a carboxy-terminal, endoplasmic reticulum retention/retrieval signal motif. In some embodiments, the PD-L1 targeting molecule comprises (a) a binding region capable of specifically binding an extracellular part of a PD-L1 target molecule; (b) a Shiga toxin effector polypeptide comprising an embedded or inserted, heterologous epitope; and (c) a carboxy-terminal, endoplasmic reticulum retention/retrieval signal motif of a member of the KDEL family. In some embodiments, the Shiga toxin effector polypeptide is capable of exhibiting at least one Shiga toxin effector function, such as, e.g., directing intracellular routing to the endoplasmic reticulum and/or cytosol of a cell in which the polypeptide is present, inhibiting a ribosome function, enzymatically inactivating a ribosome, causing cytostasis, and/or causing cytotoxicity. In some embodiments, the heterologous, T-cell epitope is a CD8+ T-cell epitope, such as, e.g., with regard to a human immune system. In some embodiments, the heterologous, T-cell epitope is capable of being presented by a MHC class I molecule of a cell. In some embodiments, the PD-L1 targeting molecule is capable of one or more the following: entering a cell, inhibiting a ribosome function, causing cytostasis, causing cell death, and/or delivering the embedded or inserted, heterologous, T-cell epitope to a MHC class I molecule for presentation on a cellular surface.

[0371] In some embodiments, the carboxy-terminal endoplasmic reticulum retention/retrieval signal motif is selected from the group consisting of: KDEL (SEQ ID NO: 111), HDEF (SEQ ID NO: 112), HDEL (SEQ ID NO: 113), RDEF (SEQ ID NO:114), RDEL (SEQ ID NO: 115), WDEL (SEQ ID NO: 116), YDEL (SEQ ID NO: 117), HEEF (SEQ ID NO: 118), HEEL (SEQ ID NO: 119), KEEL (SEQ ID NO: 120), REEL (SEQ ID NO: 121), KAEL (SEQ ID NO: 122), KCEL (SEQ ID NO: 123), KFEL (SEQ ID NO: 124), KGEL (SEQ ID NO: 125), KHEL (SEQ ID NO: 126), KLEL (SEQ ID NO: 127), KNEL (SEQ ID NO: 128), KQEL (SEQ ID NO: 129), KREL (SEQ ID NO: 130), KSEL (SEQ ID NO: 131), KVEL (SEQ ID NO: 132), KWEL (SEQ ID NO: 133), KYEL (SEQ ID NO: 134), KEDL (SEQ ID NO: 135), KIEL (SEQ ID NO: 136), DKEL (SEQ ID NO: 137), FDEL (SEQ ID NO: 138), KDEF (SEQ ID NO: 139), KKEL (SEQ ID NO: 140), HADL (SEQ ID NO: 141), HAEL (SEQ ID NO: 142), HIEL (SEQ ID NO: 143), HNEL (SEQ ID NO: 144), HTEL (SEQ ID NO: 145), KTEL (SEQ ID NO: 146), HVEL (SEQ ID NO: 147), NDEL (SEQ ID NO: 148), QDEL (SEQ ID NO: 149), REDL (SEQ ID NO: 150), RNEL (SEQ ID NO: 151), RTDL (SEQ ID NO: 152), RTEL (SEQ ID NO: 153), SDEL (SEQ ID NO: 154), TDEL (SEQ ID NO: 155), SKEL (SEQ ID NO: 156), STEL (SEQ ID NO: 157), and EDEL (SEQ ID NO: 158).

[0372] In some embodiments, the embedded or inserted, heterologous, T-cell epitope disrupts the endogenous, B-cell and/or T-cell epitope region selected from the group of natively positioned Shiga toxin A Subunit regions consisting of: (i) 1-15 of any one of SEQ ID NOs: 1-2 and 4-6; 3-14 of any one of SEQ ID NOs: 3 and 7-18; 26-37 of any one of SEQ ID NOs: 3 and 7-18; 27-37 of any one of SEQ ID NOs: 1-2 and 4-6; 39-48 of any one of SEQ ID NOs: 1-2 and 4-6; 42-48 of any one of SEQ ID NOs: 3 and 7-18; and 53-66 of any one of SEQ ID NOs: 1-18, or the equivalent region in a Shiga toxin A Subunit or derivative thereof; (ii) 94-115 of any one of SEQ ID NOs: 1-18; 141-153 of any one of SEQ ID NOs: 1-2 and 4-6; 140-156 of any one of SEQ ID NOs: 3 and 7-18; 179-190 of any one of SEQ ID NOs: 1-2 and 4-6; 179-191 of any one of SEQ ID NOs: 3 and 7-18; 204 of SEQ ID NO:3; 205 of any one of SEQ ID NOs: 1-2 and 4-6; and 210-218 of any one of SEQ ID NOs: 3 and 7-18, or the equivalent region in a Shiga toxin A Subunit or derivative thereof; and (iii) 240-260 of any one of SEQ ID NOs: 3 and 7-18; 243-257 of any one of SEQ ID NOs: 1-2 and 4-6; 254-268 of any one of SEQ ID NOs: 1-2 and 4-6; 262-278 of any one of SEQ ID NOs: 3 and 7-18; 281-297 of any one of SEQ ID NOs: 3 and 7-18; and 285-293 of any one of SEQ ID NOs: 1-2 and 4-6, or the equivalent region in a Shiga toxin A Subunit or derivative thereof.

[0373] In some embodiments, the heterologous epitope is a CD8+ T-cell epitope capable of being presented by a MHC class I molecule of a cell. In some embodiments, the heterologous epitope in is embedded and replaces an equivalent number of amino acid residues in a wild-type Shiga toxin polypeptide region such that the Shiga toxin effector polypeptide has the same total number of amino acid residues as does the wild-type Shiga toxin polypeptide region from which it is derived. In some embodiments of any of the above, the Shiga toxin effector polypeptide is capable of exhibiting at least one Shiga toxin effector function selected from: directing intracellular routing to a cytosol of a cell in which the polypeptide is present, inhibiting a ribosome function, enzymatically inactivating a ribosome, and cytotoxicity.

[0374] In some embodiments, the PD-L1 targeting molecule is capable when introduced to cells of exhibiting cytotoxicity that is greater than that of a fifth PD-L1 targeting molecule consisting of the PD-L1 targeting molecule except for it does not comprise any carboxy-terminal, endoplasmic reticulum retention/retrieval signal motif of the KDEL family. In some embodiments, the PD-L1 targeting molecule is capable of exhibiting a cytotoxicity with better optimized, cytotoxic potency, such as, e.g., 4-fold, 5-fold, 6-fold, 9-fold, or greater cytotoxicity as compared to the fifth PD-L1 targeting molecule. In some embodiments, the cytotoxicity of the PD-L1 targeting molecule to a population of target positive cells is 3-fold, 4-fold, 5-fold, 6-fold, 7-fold, 8-fold, 9-fold, 10-fold or greater than the cytotoxicity of the fifth PD-L1 targeting molecule to a second population of target positive cells as assayed by CD₅₀ values.

[0375] In some embodiments, the PD-L1 targeting molecule is capable of delivering an embedded or inserted, heterologous, CD8+ T-cell epitope to a MHC class I presentation pathway of a cell for cell-surface presentation of the epitope bound by a MHC class I molecule.

[0376] In some embodiments, the PD-L1 targeting molecule is de-immunized due to the embedded or inserted, heterologous, epitope. In some embodiments, the PD-L1 targeting molecule is capable of exhibiting less relative antigenicity and/or relative immunogenicity as compared to a reference molecule, such as, e.g., another PD-L1 targeting molecule consisting of the PD-L1 targeting molecule except for it lacks one or more embedded or inserted epitopes present in the cell targeting molecule.

[0377] In some embodiments, the PD-L1 targeting molecule is not cytotoxic and is capable, when introduced to cells, of exhibiting a greater subcellular routing efficiency from an extracellular space to a subcellular compartment of an endoplasmic reticulum and/or cytosol as compared to the cytotoxicity of a reference molecule, such as, e.g., a second molecule similar to the PD-L1 targeting molecule except for that it does not comprise any carboxy-terminal, endoplasmic reticulum retention/retrieval signal motif of the KDEL family.

### PD-L1 Targeting Molecules Comprising a Shiga Toxin Effector Polypeptide Comprising (i) an Embedded or Inserted, Heterologous, T-Cell Epitope and (ii) a Disrupted, Furin-Cleavage Site

[0378] Also provided herein are PD-L1 targeting molecules, each comprising (i) a binding region capable of specifically binding an extracellular part of a PD-L1 target molecule; (ii) a Shiga toxin effector polypeptide comprising an inserted or embedded, heterologous, epitope; and (iii) a disrupted furin-cleavage site. In some embodiments, the PD-L1 targeting molecule comprises (i) a binding region capable of specifically binding an extracellular part of PD-L1; (ii) a Shiga toxin effector polypeptide comprising (a) an inserted or embedded, heterologous, epitope; (b) a Shiga toxin A1 fragment derived region having a carboxy terminus; and (c) a disrupted furin-cleavage site at the carboxy-terminus of the A1 fragment region. For some embodiments, the Shiga toxin effector polypeptide is capable of exhibiting at least one Shiga toxin effector function, such as, e.g., directing intracellular routing to the endoplasmic reticulum and/or cytosol of a cell in which the polypeptide is present, inhibiting a ribosome function, enzymatically inactivating a ribosome, causing cytostasis, and/or causing cytotoxicity. In some embodiments, the heterologous, T-cell epitope is a CD8+ T-cell epitope, such as, e.g., with regard to a human immune system. For some embodiments, the heterologous, T-cell epitope is capable of being presented by a MHC class I molecule of a cell. In some embodiments, the PD-L1 targeting molecule is capable of one or more the following: entering a cell, inhibiting a ribosome function, causing cytostasis, causing cell death, and/or delivering the embedded or inserted, heterologous, T-cell epitope to a MHC class I molecule for presentation on a cellular surface. For some embodiments, the PD-L1 targeting molecule is capable when introduced to cells of exhibiting a cytotoxicity comparable or better than a reference molecule, such as, e.g., a PD-L1 targeting molecule consisting of the PD-L1 targeting molecule except for all of its Shiga toxin effector polypeptide components comprise a wild-type Shiga toxin furin-cleavage site at the carboxy terminus of its A1 fragment region.

[0379] In some embodiments, the embedded or inserted, heterologous, T-cell epitope disrupts the endogenous, B-cell and/or T-cell epitope region selected from the group of natively positioned Shiga toxin A Subunit regions consisting of: (i) 1-15 of any one of SEQ ID NOs: 1-2 and 4-6; 3-14 of any one of SEQ ID NOs: 3 and 7-18; 26-37 of any one of SEQ ID NOs: 3 and 7-18; 27-37 of any one of SEQ ID NOs: 1-2 and 4-6; 39-48 of any one of SEQ ID NOs: 1-2 and 4-6; 42-48 of any one of SEQ ID NOs: 3 and 7-18; and 53-66 of any one of SEQ ID NOs: 1-18, or the equivalent region in a Shiga toxin A Subunit or derivative thereof; (ii) 94-115 of any one of SEQ ID NOs: 1-18; 141-153 of any one of SEQ ID NOs: 1-2 and 4-6; 140-156 of any one of SEQ ID NOs: 3 and 7-18; 179-190 of any one of SEQ ID NOs: 1-2 and 4-6; 179-191 of any one of SEQ ID NOs: 3 and 7-18; 204 of SEQ ID NO:3; 205 of any one of SEQ ID NOs: 1-2 and 4-6; and 210-218 of any one of SEQ ID NOs: 3 and 7-18, or the equivalent region in a Shiga toxin A Subunit or derivative thereof; and (iii) 240-260 of any one of SEQ ID NOs: 3 and 7-18; 243-257 of any one of SEQ ID NOs: 1-2 and 4-6; 254-268 of any one of SEQ ID NOs: 1-2 and 4-6; 262-278 of any one of SEQ ID NOs: 3 and 7-18; 281-297 of any one of SEQ ID NOs: 3 and 7-18; and 285-293 of any one of SEQ ID NOs: 1-2 and 4-6, or the equivalent region in a Shiga toxin A Subunit or derivative thereof.

[0380] In some embodiments, the disrupted furin-cleavage site comprises one or more mutations, relative to a wild-type Shiga toxin A Subunit, the mutation altering at least one amino acid residue in a region natively positioned at 248-251 of the A Subunit of Shiga toxin (SEQ ID NOs: 1-2 and 4-6), or at 247-250 of the A Subunit of Shiga-like toxin 2 (SEQ ID NOs: 3 and 7-18); or the equivalent region in a Shiga toxin A Subunit or derivative thereof. In some embodiments, the disrupted furin-cleavage site comprises one or more mutations, relative to a wild-type Shiga toxin A Subunit, in a minimal furin cleavage site of the furin-cleavage site. In some embodiments the minimal furin cleavage site is represented by the consensus amino acid sequence R/Y-x-x-R (SEQ ID NO: 159) and/or R-x-x-R (SEQ ID NO:160).

[0381] In some embodiments, the PD-L1 targeting molecule comprises a molecular moiety located carboxy-terminal to the carboxy-terminus of the Shiga toxin A1 fragment region.

[0382] In some embodiments, the binding region sterically covers the carboxy-terminus of the A1 fragment region.

[0383] In some embodiments, the molecular moiety sterically covers the carboxy-terminus of the A1 fragment region. In some embodiments, the molecular moiety comprises the binding region.

[0384] In some embodiments, the PD-L1 targeting molecule comprises a binding region and/or molecular moiety located carboxy-terminal to the carboxy-terminus of the Shiga toxin A1 fragment region. In some embodiments, the mass of the binding region and/or molecular moiety is at least 4.5 kDa, 6, kDa, 9 kDa, 12 kDa, 15 kDa, 20 kDa, 25 kDa, 28 kDa, 30 kDa, 41 kDa, 50 kDa, 100 kDa, or greater.

[0385] In some embodiments, the PD-L1 targeting molecule comprises a binding region with a mass of at least 4.5 kDa, 6, kDa, 9 kDa, 12 kDa, 15 kDa, 20 kDa, 25 kDa, 28 kDa, 30 kDa, 41 kDa, 50 kDa, 100 kDa, or greater, as long as the PD-L1 targeting molecule retains the appropriate level of the Shiga toxin biological activity noted herein (e.g., cytotoxicity and/or intracellular routing).

[0386] In some embodiments, the binding region is comprised within a relatively large, molecular moiety comprising such as, e.g., a molecular moiety with a mass of at least 4.5 kDa, 6, kDa, 9 kDa, 12 kDa, 15 kDa, 20 kDa, 25 kDa, 28 kDa, 30 kDa, 41 kDa, 50 kDa, 100 kDa, or greater, as long as the PD-L1 targeting molecule retains the appropriate level of the Shiga toxin biological activity noted herein.

[0387] In some embodiments, the disrupted furin-cleavage site comprises an amino acid residue substitution in the furin-cleavage site relative to a wild-type Shiga toxin A Subunit. In some embodiments, the substitution of the amino acid residue in the furin-cleavage site is of an arginine residue with a non-positively charged, amino acid residue selected from the group consisting of: alanine, glycine, proline, serine, threonine, aspartate, asparagine, glutamate, glutamine, cysteine, isoleucine, leucine, methionine, valine, phenylalanine, tryptophan, and tyrosine. In some embodiments, the substitution of the amino acid residue in the furin-cleavage site is of an arginine residue with a histidine.

[0388] In some embodiments, the PD-L1 targeting molecule is capable when introduced to cells of exhibiting cytotoxicity comparable to the cytotoxicity of a reference PD-L1 targeting molecule consisting of the PD-L1 targeting molecule except for all of its Shiga toxin effector polypeptide component(s) each comprise a wild-type Shiga toxin A1 fragment and/or wild-type Shiga toxin furin-cleavage site at the carboxy terminus of its A1 fragment region. In some embodiments, the PD-L1 targeting molecule is capable when introduced to cells of exhibiting cytotoxicity that is in a range of from 0.1-fold, 0.5-fold, or 0.75-fold to 1.2-fold, 1.5-fold, 1.75-fold, 2-fold, 3-fold, 4-fold, or 5-fold of the cytotoxicity exhibited by the reference PD-L1 targeting molecule.

[0389] In some embodiments, the PD-L1 targeting molecule is capable when introduced to a chordate of exhibiting improved, in vivo tolerability compared to in vivo tolerability of the reference PD-L1 targeting molecule.

[0390] In some embodiments, the PD-L1 targeting molecule is de-immunized due to the embedded or inserted, heterologous, epitope. In some embodiments, the PD-L1 targeting molecule is capable of exhibiting less relative antigenicity and/or relative immunogenicity as compared to a reference molecule, such as, e.g., a PD-L1 targeting molecule consisting of the PD-L1 targeting molecule except for it lacks one or more embedded or inserted epitopes present in the cell targeting molecule.

[0391] In some embodiments, the PD-L1 targeting molecule is de-immunized due to the furin-cleavage site disruption. In some embodiments, the PD-L1 targeting molecule is capable of exhibiting less relative antigenicity and/or relative immunogenicity as compared to a reference PD-L1 targeting molecule consisting of the PD-L1 targeting molecule except for the furin-cleavage site is wild-type and/or all the Shiga toxin effector polypeptide components consist of a wild-type Shiga toxin A1 fragment.

### PD-L1 Targeting Molecules Comprising a Shiga Toxin Effector Polypeptide at or Proximal to an Amino-Terminus and Wherein the Shiga Toxin Effector Polypeptide Comprises an Embedded or Inserted, Heterologous, T-Cell Epitope

[0392] Also provided herein are PD-L1 targeting molecules, each comprising (i) a binding region capable of specifically binding an extracellular part of a PD-L1 target molecule; (ii) a Shiga toxin effector polypeptide comprising an inserted or embedded, heterologous, epitope; wherein the Shiga toxin effector polypeptide is at or proximal to an amino-terminus of a polypeptide. In some embodiments, the PD-L1 targeting molecule comprises (i) a binding region capable of specifically binding an extracellular part of PD-L1, (ii) a polypeptide component, and (iii) a Shiga toxin effector polypeptide comprising an inserted or embedded, heterologous, epitope; wherein the Shiga toxin effector polypeptide is at or proximal to an amino-terminus of the polypeptide component of the PD-L1 targeting molecule. In some embodiments, the binding region and Shiga toxin effector polypeptide are physically arranged or oriented within the PD-L1 targeting molecule such that the binding region is not located proximally to the amino-terminus of the Shiga toxin effector polypeptide. In some embodiments, the binding region is located within the PD-L1 targeting molecule more proximal to the carboxy-terminus of the Shiga toxin effector polypeptide than to the amino-terminus of the Shiga toxin effector polypeptide. In some embodiments, the binding region is not located proximally to an amino-terminus of the PD-L1 targeting molecule relative to the Shiga toxin effector polypeptide. In some embodiments, the Shiga toxin effector polypeptide is capable of exhibiting at least one Shiga toxin effector function, such as, e.g., directing intracellular routing to the endoplasmic reticulum and/or cytosol of a cell in which the polypeptide is present, inhibiting a ribosome function, enzymatically inactivating a ribosome, causing cytostasis, and/or causing cytotoxicity. In some embodiments, the heterologous, T-cell epitope is a CD8+ T-cell epitope, such as, e.g., with regard to a human immune system. In some embodiments, the heterologous, T-cell epitope is capable of being presented by a MEW class I molecule of a cell. In some embodiments, the PD-L1 targeting molecule is capable of one or more the following: entering a cell, inhibiting a ribosome function, causing cytostasis, causing cell death, and/or delivering the embedded or inserted, heterologous, T-cell epitope to a MEW class I molecule for presentation on a cellular surface.

[0393] In some embodiments, the PD-L1 targeting molecule is capable when introduced to cells of exhibiting cytotoxicity that is greater than that of a reference PD-L1 targeting molecule having an amino-terminus and comprising the binding region and the Shiga toxin effector polypeptide region which is not positioned at or proximal to the amino-terminus of the reference PD-L1 targeting molecule. In some embodiments, the PD-L1 targeting molecule is capable of exhibiting a cytotoxicity with better optimized, cytotoxic potency, such as, e.g., 4-fold, 5-fold, 6-fold, 9-fold, or greater cytotoxicity as compared to the reference PD-L1 targeting molecule. In some embodiments, the cytotoxicity of the PD-L1 targeting molecule to a population of target positive cells is 3-fold, 4-fold, 5-fold, 6-fold, 7-fold, 8-fold, 9-fold, 10-fold or greater than the cytotoxicity of the reference PD-L1 targeting molecule to a second population of target positive cells as assayed by CD₅₀ values.

[0394] In some embodiments, the PD-L1 targeting molecule is capable of delivering an embedded or inserted, heterologous, CD8+ T-cell epitope to a MEW class I presentation pathway of a cell for cell-surface presentation of the epitope bound by a MEW class I molecule.

[0395] In some embodiments, the PD-L1 targeting molecule is de-immunized due to the embedded or inserted, heterologous, epitope. In some embodiments, the PD-L1 targeting molecule is capable of exhibiting less relative antigenicity and/or relative immunogenicity as compared to a reference molecule, such as, e.g., a PD-L1 targeting molecule consisting of the PD-L1 targeting molecule except for it lacks one or more embedded or inserted epitopes present in the cell targeting molecule.

[0396] In some embodiments, the PD-L1 targeting molecule is not cytotoxic and is capable when introduced to cells of exhibiting a greater subcellular routing efficiency from an extracellular space to a subcellular compartment of an endoplasmic reticulum and/or cytosol as compared to the cytotoxicity of a reference molecule, such as, e.g. a reference PD-L1 targeting molecule having an amino-terminus and comprising the binding region and the Shiga toxin effector polypeptide region which is not positioned at or proximal to the amino-terminus of the reference PD-L1 targeting molecule.

### PD-L1 Targeting Molecules Comprising a De-Immunized Shiga Toxin Effector Polypeptide Comprising a Disrupted, Furin-Cleavage Site

[0397] Also provided herein are PD-L1 targeting molecules, each comprising (i) a binding region capable of specifically binding an extracellular part of a PD-L1 target molecule and (ii) a de-immunized, Shiga toxin effector polypeptide comprising a disrupted furin-cleavage site. In some embodiments, the PD-L1 targeting molecule comprises (i) a binding region capable of specifically binding an extracellular part of PD-L1 and (ii) a de-immunized, Shiga toxin effector polypeptide comprising (a) a Shiga toxin A1 fragment derived region having a carboxy terminus, (b) a disrupted furin-cleavage site at the carboxy-terminus of the A1 fragment region, and (c) at least one disrupted, endogenous, B-cell and/or CD4+ T-cell epitope and/or epitope region. In some embodiments, the Shiga toxin effector polypeptide is capable of exhibiting at least one Shiga toxin effector function, such as, e.g., directing intracellular routing to the endoplasmic reticulum and/or cytosol of a cell in which the polypeptide is present, inhibiting a ribosome function, enzymatically inactivating a ribosome, causing cytostasis, and/or causing cytotoxicity. In some embodiments, the PD-L1 targeting molecule is capable of one or more the following: entering a cell, inhibiting a ribosome function, causing cytostasis, and/or causing cell death. In some embodiments, the PD-L1 targeting molecule is capable when introduced to cells of exhibiting a cytotoxicity comparable or better than a reference molecule, such as, e.g., a PD-L1 targeting molecule consisting of the PD-L1 targeting molecule except for all of its Shiga toxin effector polypeptide components comprise a wild-type Shiga toxin furin-cleavage site at the carboxy terminus of its A1 fragment region.

[0398] In some embodiments, the Shiga toxin effector polypeptide comprises a mutation, relative to a wild-type Shiga toxin A Subunit, in the B-cell and/or T-cell epitope region selected from the group of natively positioned Shiga toxin A Subunit regions consisting of: 1-15 of any one of SEQ ID NOs: 1-2 and 4-6; 3-14 of any one of SEQ ID NOs: 3 and 7-18; 26-37 of any one of SEQ ID NOs: 3 and 7-18; 27-37 of any one of SEQ ID NOs: 1-2 and 4-6; 39-48 of any one of SEQ ID NOs: 1-2 and 4-6; 42-48 of any one of SEQ ID NOs: 3 and 7-18; and 53-66 of any one of SEQ ID NOs: 1-18; 94-115 of any one of SEQ ID NOs: 1-18; 141-153 of any one of SEQ ID NOs: 1-2 and 4-6; 140-156 of any one of SEQ ID NOs: 3 and 7-18; 179-190 of any one of SEQ ID NOs: 1-2 and 4-6; 179-191 of any one of SEQ ID NOs: 3 and 7-18; 204 of SEQ ID NO:3; 205 of any one of SEQ ID NOs: 1-2 and 4-6; and 210-218 of any one of SEQ ID NOs: 3 and 7-18; 240-260 of any one of SEQ ID NOs: 3 and 7-18; 243-257 of any one of SEQ ID NOs: 1-2 and 4-6; 254-268 of any one of SEQ ID NOs: 1-2 and 4-6; 262-278 of any one of SEQ ID NOs: 3 and 7-18; 281-297 of any one of SEQ ID NOs: 3 and 7-18; and 285-293 of any one of SEQ ID NOs: 1-2 and 4-6; or the equivalent region in a Shiga toxin A Subunit or derivative thereof. In some embodiments, there is no disruption which is a carboxy-terminal truncation of amino acid residues that overlap with part or all of at least one disrupted, endogenous, B-cell and/or T-cell epitope and/or epitope region.

[0399] In some embodiments, the disrupted furin-cleavage site comprises one or more mutations, relative to a wild-type Shiga toxin A Subunit, the mutation altering at least one amino acid residue in a region natively positioned at 248-251 of the A Subunit of Shiga toxin (SEQ ID NOs: 1-2 and 4-6), or at 247-250 of the A Subunit of Shiga-like toxin 2 (SEQ ID NOs: 3 and 7-18), or the equivalent region in a Shiga toxin A Subunit or derivative thereof. In some embodiments, the disrupted furin-cleavage site comprises one or more mutations, relative to a wild-type Shiga toxin A Subunit, in a minimal furin cleavage site of the furin-cleavage site. In some embodiments the minimal furin cleavage site is represented by the consensus amino acid sequence R/Y-x-x-R (SEQ ID NO: 159) and/or R-x-x-R (SEQ ID NO: 160).

[0400] In some embodiments, the PD-L1 targeting molecule comprises a molecular moiety located carboxy-terminal to the carboxy-terminus of the Shiga toxin A1 fragment region.

[0401] In some embodiments, the binding region sterically covers the carboxy-terminus of the A1 fragment region.

[0402] In some embodiments, the molecular moiety sterically covers the carboxy-terminus of the A1 fragment region. In some embodiments, the molecular moiety comprises the binding region.

[0403] In some embodiments, the PD-L1 targeting molecule comprises a binding region and/or molecular moiety located carboxy-terminal to the carboxy-terminus of the Shiga toxin A1 fragment region. In some embodiments, the mass of the binding region and/or molecular moiety is at least 4.5 kDa, 6, kDa, 9 kDa, 12 kDa, 15 kDa, 20 kDa, 25 kDa, 28 kDa, 30 kDa, 41 kDa, 50 kDa, 100 kDa, or greater.

[0404] In some embodiments, the PD-L1 targeting molecule comprises a binding region with a mass of at least 4.5 kDa, 6, kDa, 9 kDa, 12 kDa, 15 kDa, 20 kDa, 25 kDa, 28 kDa, 30 kDa, 41 kDa, 50 kDa, 100 kDa, or greater, as long as the PD-L1 targeting molecule retains the appropriate level of the Shiga toxin biological activity noted herein (e.g., cytotoxicity and/or intracellular routing).

[0405] In some embodiments, the binding region is comprised within a relatively large, molecular moiety comprising such as, e.g., a molecular moiety with a mass of at least 4.5 kDa, 6, kDa, 9 kDa, 12 kDa, 15 kDa, 20 kDa, 25 kDa, 28 kDa, 30 kDa, 41 kDa, 50 kDa, 100 kDa, or greater, as long as the PD-L1 targeting molecule retains the appropriate level of the Shiga toxin biological activity noted herein.

[0406] In some embodiments, the disrupted furin-cleavage site comprises an amino acid residue substitution in the furin-cleavage site relative to a wild-type Shiga toxin A Subunit. In some embodiments, the substitution of the amino acid residue in the furin-cleavage site is of an arginine residue with a non-positively charged, amino acid residue selected from the group consisting of: alanine, glycine, proline, serine, threonine, aspartate, asparagine, glutamate, glutamine, cysteine, isoleucine, leucine, methionine, valine, phenylalanine, tryptophan, and tyrosine. In some embodiments, the substitution of the amino acid residue in the furin-cleavage site is of an arginine residue with a histidine.

[0407] In some embodiments, the PD-L1 targeting molecule is capable, when introduced to cells, of exhibiting cytotoxicity comparable to the cytotoxicity of a reference molecule, such as, e.g., a PD-L1 targeting molecule consisting of the PD-L1 targeting molecule except for all of its Shiga toxin effector polypeptide component(s) each comprise a wild-type Shiga toxin A1 fragment and/or wild-type Shiga toxin furin-cleavage site at the carboxy terminus of its A1 fragment region.

[0408] In some embodiments, the PD-L1 targeting molecule is de-immunized due to the furin-cleavage site disruption. In some embodiments, the PD-L1 targeting molecule is capable of exhibiting less relative antigenicity and/or relative immunogenicity as compared to a reference molecule similar to the PD-L1 targeting molecule except for the furin-cleavage site is wild-type and/or all the Shiga toxin effector polypeptide components consist of a wild-type Shiga toxin A1 fragment.

### PD-L1 Targeting Molecules Comprising a Carboxy-Terminal Endoplasmic Reticulum Retention/Retrieval Signal Motif and a De-Immunized Shiga Toxin Effector Polypeptide

[0409] Also provided herein are PD-L1 targeting molecules, each comprising (i) a binding region capable of specifically binding an extracellular part of a PD-L1 target molecule; (ii) a de-immunized, Shiga toxin effector polypeptide, and (iii) a carboxy-terminal, endoplasmic reticulum retention/retrieval signal motif. In some embodiments, the PD-L1 targeting molecule comprises (i) a binding region capable of specifically binding an extracellular part of PD-L1; (ii) a de-immunized, Shiga toxin effector polypeptide comprising at least one disrupted, endogenous, B-cell and/or CD4+ T-cell epitope and/or epitope region, and (iii) a carboxy-terminal, endoplasmic reticulum retention/retrieval signal motif of a member of the KDEL family. In some embodiments, the Shiga toxin effector polypeptide is capable of exhibiting at least one Shiga toxin effector function, such as, e.g., directing intracellular routing to the endoplasmic reticulum and/or cytosol of a cell in which the polypeptide is present, inhibiting a ribosome function, enzymatically inactivating a ribosome, causing cytostasis, and/or causing cytotoxicity. In some embodiments, the PD-L1 targeting molecule is capable of one or more the following: entering a cell, inhibiting a ribosome function, causing cytostasis, and/or causing cell death.

[0410] In some embodiments, the carboxy-terminal endoplasmic reticulum retention/retrieval signal motif is selected from the group consisting of: KDEL (SEQ ID NO: 111), HDEF (SEQ ID NO: 112), HDEL (SEQ ID NO: 113), RDEF (SEQ ID NO:114), RDEL (SEQ ID NO: 115), WDEL (SEQ ID NO: 116), YDEL (SEQ ID NO: 117), HEEF (SEQ ID NO: 118), HEEL (SEQ ID NO: 119), KEEL (SEQ ID NO: 120), REEL (SEQ ID NO: 121), KAEL (SEQ ID NO: 122), KCEL (SEQ ID NO: 123), KFEL (SEQ ID NO: 124), KGEL (SEQ ID NO: 125), KHEL (SEQ ID NO: 126), KLEL (SEQ ID NO: 127), KNEL (SEQ ID NO: 128), KQEL (SEQ ID NO: 129), KREL (SEQ ID NO: 130), KSEL (SEQ ID NO: 131), KVEL (SEQ ID NO: 132), KWEL (SEQ ID NO: 133), KYEL (SEQ ID NO: 134), KEDL (SEQ ID NO: 135), KIEL (SEQ ID NO: 136), DKEL (SEQ ID NO: 137), FDEL (SEQ ID NO: 138), KDEF (SEQ ID NO: 139), KKEL (SEQ ID NO: 140), HADL (SEQ ID NO: 141), HAEL (SEQ ID NO: 142), HIEL (SEQ ID NO: 143), HNEL (SEQ ID NO: 144), HTEL (SEQ ID NO: 145), KTEL (SEQ ID NO: 146), HVEL (SEQ ID NO: 147), NDEL (SEQ ID NO: 148), QDEL (SEQ ID NO: 149), REDL (SEQ ID NO: 150), RNEL (SEQ ID NO: 151), RTDL (SEQ ID NO: 152), RTEL (SEQ ID NO: 153), SDEL (SEQ ID NO: 154), TDEL (SEQ ID NO: 155), SKEL (SEQ ID NO: 156), STEL (SEQ ID NO: 157), and EDEL (SEQ ID NO: 158).

[0411] In some embodiments, the Shiga toxin effector polypeptide comprises a mutation, relative to a wild-type Shiga toxin A Subunit, in the B-cell and/or T-cell epitope region selected from the group of natively positioned Shiga toxin A Subunit regions consisting of: 1-15 of any one of SEQ ID NOs: 1-2 and 4-6; 3-14 of any one of SEQ ID NOs: 3 and 7-18; 26-37 of any one of SEQ ID NOs: 3 and 7-18; 27-37 of any one of SEQ ID NOs: 1-2 and 4-6; 39-48 of any one of SEQ ID NOs: 1-2 and 4-6; 42-48 of any one of SEQ ID NOs: 3 and 7-18; and 53-66 of any one of SEQ ID NOs: 1-18; 94-115 of any one of SEQ ID NOs: 1-18; 141-153 of any one of SEQ ID NOs: 1-2 and 4-6; 140-156 of any one of SEQ ID NOs: 3 and 7-18; 179-190 of any one of SEQ ID NOs: 1-2 and 4-6; 179-191 of any one of SEQ ID NOs: 3 and 7-18; 204 of SEQ ID NO:3; 205 of any one of SEQ ID NOs: 1-2 and 4-6; and 210-218 of any one of SEQ ID NOs: 3 and 7-18; 240-260 of any one of SEQ ID NOs: 3 and 7-18; 243-257 of any one of SEQ ID NOs: 1-2 and 4-6; 254-268 of any one of SEQ ID NOs: 1-2 and 4-6; 262-278 of any one of SEQ ID NOs: 3 and 7-18; 281-297 of any one of SEQ ID NOs: 3 and 7-18; and 285-293 of any one of SEQ ID NOs: 1-2 and 4-6; or the equivalent region in a Shiga toxin A Subunit or derivative thereof. In some embodiments, there is no disruption which is a carboxy-terminal truncation of amino acid residues that overlap with part or all of at least one disrupted, endogenous, B-cell and/or T-cell epitope and/or epitope region.

[0412] In some embodiments, the PD-L1 targeting molecule is capable when introduced to cells of exhibiting cytotoxicity that is greater than that of a reference PD-L1 targeting molecule consisting of the PD-L1 targeting molecule except for it does not comprise any carboxy-terminal, endoplasmic reticulum retention/retrieval signal motif of the KDEL family. In some embodiments, the PD-L1 targeting molecule is capable of exhibiting a cytotoxicity with better optimized, cytotoxic potency, such as, e.g., 4-fold, 5-fold, 6-fold, 9-fold, or greater cytotoxicity as compared to the reference PD-L1 targeting molecule. In some embodiments, the cytotoxicity of the PD-L1 targeting molecule to a population of target positive cells is 3-fold, 4-fold, 5-fold, 6-fold, 7-fold, 8-fold, 9-fold, 10-fold or greater than the cytotoxicity of the thirteenth PD-L1 targeting molecule to a second population of target positive cells as assayed by CD₅₀ values.

[0413] In some embodiments, the PD-L1 targeting molecule is not cytotoxic and is capable when introduced to cells of exhibiting a greater subcellular routing efficiency from an extracellular space to a subcellular compartment of an endoplasmic reticulum and/or cytosol as compared to the cytotoxicity of a reference molecule, such as, e.g. a reference PD-L1 targeting molecule having an amino-terminus and comprising the binding region and the Shiga toxin effector polypeptide region which is not positioned at or proximal to the amino-terminus of the reference PD-L1 targeting molecule and lacks a carboxy-terminal, endoplasmic reticulum retention/retrieval signal motif of the KDEL family.

### PD-L1 Targeting Molecules Comprising a De-Immunized Shiga Toxin Effector Polypeptide at or Proximal to an Amino-Terminus of the Cell Targeting Molecule

[0414] Also provided herein are PD-L1 targeting molecules, each comprising (i) a binding region capable of specifically binding an extracellular part of a PD-L1 target molecule, (ii) a de-immunized, Shiga toxin effector polypeptide; wherein the Shiga toxin effector polypeptide is at or proximal to an amino-terminus. In some embodiments, the PD-L1 targeting molecule comprises (i) a binding region capable of specifically binding an extracellular part of PD-L1; (ii) polypeptide component; and (iii) a de-immunized, Shiga toxin effector polypeptide comprising at least one disrupted, endogenous, B-cell and/or CD4+ T-cell epitope and/or epitope region; wherein the Shiga toxin effector polypeptide is at or proximal to an amino-terminus of the polypeptide component of the PD-L1 targeting molecule. In some embodiments, the binding region and Shiga toxin effector polypeptide are physically arranged or oriented within the PD-L1 targeting molecule such that the binding region is not located proximally to the amino-terminus of the Shiga toxin effector polypeptide. In some embodiments, the binding region is located within the PD-L1 targeting molecule more proximal to the carboxy-terminus of the Shiga toxin effector polypeptide than to the amino-terminus of the Shiga toxin effector polypeptide. In some embodiments, the binding region is not located proximally to an amino-terminus of the PD-L1 targeting molecule relative to the Shiga toxin effector polypeptide. For some embodiments, the Shiga toxin effector polypeptide is capable of exhibiting at least one Shiga toxin effector function, such as, e.g., directing intracellular routing to the endoplasmic reticulum and/or cytosol of a cell in which the polypeptide is present, inhibiting a ribosome function, enzymatically inactivating a ribosome, causing cytostasis, and/or causing cytotoxicity. In some embodiments, the PD-L1 targeting molecule is capable of one or more the following: entering a cell, inhibiting a ribosome function, causing cytostasis, and/or causing cell death.

[0415] In some embodiments, the Shiga toxin effector polypeptide comprises a mutation, relative to a wild-type Shiga toxin A Subunit, in the B-cell and/or T-cell epitope region selected from the group of natively positioned Shiga toxin A Subunit regions consisting of: 11-15 of any one of SEQ ID NOs: 1-2 and 4-6; 3-14 of any one of SEQ ID NOs: 3 and 7-18; 26-37 of any one of SEQ ID NOs: 3 and 7-18; 27-37 of any one of SEQ ID NOs: 1-2 and 4-6; 39-48 of any one of SEQ ID NOs: 1-2 and 4-6; 42-48 of any one of SEQ ID NOs: 3 and 7-18; and 53-66 of any one of SEQ ID NOs: 1-18; 94-115 of any one of SEQ ID NOs: 1-18; 141-153 of any one of SEQ ID NOs: 1-2 and 4-6; 140-156 of any one of SEQ ID NOs: 3 and 7-18; 179-190 of any one of SEQ ID NOs: 1-2 and 4-6; 179-191 of any one of SEQ ID NOs: 3 and 7-18; 204 of SEQ ID NO:3; 205 of any one of SEQ ID NOs: 1-2 and 4-6; and 210-218 of any one of SEQ ID NOs: 3 and 7-18; 240-260 of any one of SEQ ID NOs: 3 and 7-18; 243-257 of any one of SEQ ID NOs: 1-2 and 4-6; 254-268 of any one of SEQ ID NOs: 1-2 and 4-6; 262-278 of any one of SEQ ID NOs: 3 and 7-18; 281-297 of any one of SEQ ID NOs: 3 and 7-18; and 285-293 of any one of SEQ ID NOs: 1-2 and 4-6; or the equivalent region in a Shiga toxin A Subunit or derivative thereof. In some embodiments, there is no disruption which is a carboxy-terminal truncation of amino acid residues that overlap with part or all of at least one disrupted, endogenous, B-cell and/or T-cell epitope and/or epitope region.

[0416] In some embodiments, the PD-L1 targeting molecule is capable, when introduced to cells, of exhibiting cytotoxicity that is greater than that of a reference PD-L1 targeting molecule having an amino-terminus and comprising the binding region and the Shiga toxin effector polypeptide region which is not positioned at or proximal to the amino-terminus of the reference PD-L1 targeting molecule. In some embodiments, the PD-L1 targeting molecule is capable of exhibiting a cytotoxicity with better optimized, cytotoxic potency, such as, e.g., 4-fold, 5-fold, 6-fold, 9-fold, or greater cytotoxicity as compared to the reference PD-L1 targeting molecule. In some embodiments, the cytotoxicity of the PD-L1 targeting molecule to a population of target positive cells is 3-fold, 4-fold, 5-fold, 6-fold, 7-fold, 8-fold, 9-fold, 10-fold or greater than the cytotoxicity of the reference PD-L1 targeting molecule to a second population of target positive cells as assayed by CD₅₀ values.

[0417] In some embodiments, the PD-L1 targeting molecule is not cytotoxic and is capable when introduced to cells of exhibiting a greater subcellular routing efficiency from an extracellular space to a subcellular compartment of an endoplasmic reticulum and/or cytosol as compared to the cytotoxicity of a reference molecule, such as, e.g. a reference PD-L1 targeting molecule having an amino-terminus and comprising the binding region and the Shiga toxin effector polypeptide region which is not positioned at or proximal to the amino-terminus of the reference PD-L1 targeting molecule.

### PD-L1 Targeting Molecules Comprising a Carboxy-Terminal Endoplasmic Reticulum Retention/Retrieval Signal Motif and a Shiga Toxin Effector Polypeptide Comprising a Disrupted, Furin-Cleavage Site

[0418] Also provided herein are PD-L1 targeting molecules, each comprising (i) a binding region capable of specifically binding an extracellular part of a PD-L1 target molecule; (ii) a Shiga toxin effector polypeptide comprising a disrupted furin-cleavage site; and (iii) a carboxy-terminal endoplasmic reticulum retention/retrieval signal motif. In some embodiments, PD-L1 targeting molecules comprise (i) a binding region capable of specifically binding an extracellular part of PD-L1; (ii) a Shiga toxin effector polypeptide comprising a disrupted furin-cleavage site; and (iii) a carboxy-terminal, endoplasmic reticulum retention/retrieval signal motif of a member of the KDEL family. In some embodiments, the Shiga toxin effector polypeptide is capable of exhibiting at least one Shiga toxin effector function, such as, e.g., directing intracellular routing to the endoplasmic reticulum and/or cytosol of a cell in which the polypeptide is present, inhibiting a ribosome function, enzymatically inactivating a ribosome, causing cytostasis, and/or causing cytotoxicity. In some embodiments, the PD-L1 targeting molecule is capable of one or more the following: entering a cell, inhibiting a ribosome function, causing cytostasis, and/or causing cell death. For some embodiments, the PD-L1 targeting molecule is capable when introduced to cells of exhibiting a cytotoxicity comparable or better than a reference molecule, such as, e.g., a molecule similar to the PD-L1 targeting molecule except for all of its Shiga toxin effector polypeptide components comprise a wild-type Shiga toxin furin-cleavage site at the carboxy terminus of its A1 fragment region.

[0419] In some embodiments, the disrupted furin-cleavage site comprises one or more mutations, relative to a wild-type Shiga toxin A Subunit, the mutation altering at least one amino acid residue in a region natively positioned at 248-251 of the A Subunit of Shiga toxin (SEQ ID NOs: 1-2 and 4-6), or at 247-250 of the A Subunit of Shiga-like toxin 2 (SEQ ID NOs: 3 and 7-18), or the equivalent region in a Shiga toxin A Subunit or derivative thereof. In some embodiments, the disrupted furin-cleavage site comprises one or more mutations, relative to a wild-type Shiga toxin A Subunit, in a minimal furin cleavage site of the furin-cleavage site. In some embodiments the minimal furin cleavage site is represented by the consensus amino acid sequence R/Y-x-x-R (SEQ ID NO: 159) and/or R-x-x-R (SEQ ID NO: 160).

[0420] In some embodiments, the PD-L1 targeting molecule comprises a molecular moiety located carboxy-terminal to the carboxy-terminus of the Shiga toxin A1 fragment region.

[0421] In some embodiments, the binding region sterically covers the carboxy-terminus of the A1 fragment region.

[0422] In some embodiments, the molecular moiety sterically covers the carboxy-terminus of the A1 fragment region. In some embodiments, the molecular moiety comprises the binding region.

[0423] In some embodiments, the PD-L1 targeting molecule comprises a binding region and/or molecular moiety located carboxy-terminal to the carboxy-terminus of the Shiga toxin A1 fragment region. In some embodiments, the mass of the binding region and/or molecular moiety is at least 4.5 kDa, 6, kDa, 9 kDa, 12 kDa, 15 kDa, 20 kDa, 25 kDa, 28 kDa, 30 kDa, 41 kDa, 50 kDa, 100 kDa, or greater.

[0424] In some embodiments, the PD-L1 targeting molecule comprises a binding region with a mass of at least 4.5 kDa, 6, kDa, 9 kDa, 12 kDa, 15 kDa, 20 kDa, 25 kDa, 28 kDa, 30 kDa, 41 kDa, 50 kDa, 100 kDa, or greater, as long as the PD-L1 targeting molecule retains the appropriate level of the Shiga toxin biological activity noted herein (e.g., cytotoxicity and/or intracellular routing).

[0425] In some embodiments, the binding region is comprised within a relatively large, molecular moiety comprising such as, e.g., a molecular moiety with a mass of at least 4.5 kDa, 6, kDa, 9 kDa, 12 kDa, 15 kDa, 20 kDa, 25 kDa, 28 kDa, 30 kDa, 41 kDa, 50 kDa, 100 kDa, or greater, as long as the PD-L1 targeting molecule retains the appropriate level of the Shiga toxin biological activity noted herein.

[0426] In some embodiments, the disrupted furin-cleavage site comprises an amino acid residue substitution in the furin-cleavage site relative to a wild-type Shiga toxin A Subunit. In some embodiments, the substitution of the amino acid residue in the furin-cleavage site is of an arginine residue with a non-positively charged, amino acid residue selected from the group consisting of: alanine, glycine, proline, serine, threonine, aspartate, asparagine, glutamate, glutamine, cysteine, isoleucine, leucine, methionine, valine, phenylalanine, tryptophan, and tyrosine. In some embodiments, the substitution of the amino acid residue in the furin-cleavage site is of an arginine residue with a histidine.

[0427] In some embodiments, the PD-L1 targeting molecule is capable when introduced to cells of exhibiting cytotoxicity that is greater than that of a reference PD-L1 targeting molecule consisting of the PD-L1 targeting molecule except for it does not comprise any carboxy-terminal, endoplasmic reticulum retention/retrieval signal motif of the KDEL family. In some embodiments, the PD-L1 targeting molecule is capable of exhibiting a cytotoxicity with better optimized, cytotoxic potency, such as, e.g., 4-fold, 5-fold, 6-fold, 9-fold, or greater cytotoxicity as compared to the reference PD-L1 targeting molecule. In some embodiments, the cytotoxicity of the PD-L1 targeting molecule to a population of target positive cells is 3-fold, 4-fold, 5-fold, 6-fold, 7-fold, 8-fold, 9-fold, 10-fold or greater than the cytotoxicity of the reference PD-L1 targeting molecule to a second population of target positive cells as assayed by CD₅₀ values.

[0428] In some embodiments, the PD-L1 targeting molecule is capable when introduced to a chordate of exhibiting improved, in vivo tolerability compared to in vivo tolerability of a reference PD-L1 targeting molecule consisting of the PD-L1 targeting molecule except for all of its Shiga toxin effector polypeptide component(s) each comprise a wild-type Shiga toxin A1 fragment and/or wild-type Shiga toxin furin-cleavage site at the carboxy terminus of its A1 fragment region.

[0429] In some embodiments, the PD-L1 targeting molecule is de-immunized due to the furin-cleavage site disruption. In some embodiments, the PD-L1 targeting molecule is capable of exhibiting less relative antigenicity and/or relative immunogenicity as compared to a reference PD-L1 targeting molecule consisting of the PD-L1 targeting molecule except for the furin-cleavage site is wild-type and/or all the Shiga toxin effector polypeptide components consist of a wild-type Shiga toxin A1 fragment, such as, e.g., a reference PD-L1 targeting molecule consisting of the PD-L1 targeting molecule except for all of its Shiga toxin effector polypeptide component(s) each comprise a wild-type Shiga toxin A1 fragment and/or wild-type Shiga toxin furin-cleavage site at the carboxy terminus of its A1 fragment region.

[0430] In some embodiments, the PD-L1 targeting molecule is not cytotoxic and is capable when introduced to cells of exhibiting a greater subcellular routing efficiency from an extracellular space to a subcellular compartment of an endoplasmic reticulum and/or cytosol as compared to the cytotoxicity of the reference PD-L1 targeting molecule.

### PD-L1 Targeting Molecules Comprising a Furin-Cleavage Resistant Shiga Toxin Effector Polypeptide at or Proximal to an Amino-Terminus of the Cell Targeting Molecule

[0431] Also provided herein are PD-L1 targeting molecules, each comprising (i) a binding region capable of specifically binding an extracellular part of a PD-L1 target molecule and (ii) a Shiga toxin effector polypeptide comprising a disrupted furin-cleavage site at the carboxy-terminus of its Shiga toxin A1 fragment region; wherein the amino-terminus of the Shiga toxin effector polypeptide is at and/or proximal to an amino-terminus of a polypeptide component of the PD-L1 targeting molecule. In some embodiments, the PD-L1 targeting molecule comprises (i) a binding region capable of specifically binding an extracellular part of PD-L1, (ii) a Shiga toxin effector polypeptide having an amino-terminus and a Shiga toxin A1 fragment derived region having a carboxy terminus, and (iii) a disrupted furin-cleavage site at the carboxy-terminus of the A1 fragment region; wherein the binding region is not located proximally to the amino-terminus of the PD-L1 targeting molecule relative to the Shiga toxin effector polypeptide. In some embodiments, the binding region and Shiga toxin effector polypeptide are physically arranged or oriented within the PD-L1 targeting molecule such that the binding region is not located proximally to the amino-terminus of the Shiga toxin effector polypeptide. In some embodiments, the binding region is located within the PD-L1 targeting molecule more proximal to the carboxy-terminus of the Shiga toxin effector polypeptide than to the amino-terminus of the Shiga toxin effector polypeptide. In some embodiments, the binding region is not located proximally to an amino-terminus of the PD-L1 targeting molecule relative to the Shiga toxin effector polypeptide. For some embodiments, the Shiga toxin effector polypeptide is capable of exhibiting at least one Shiga toxin effector function, such as, e.g., directing intracellular routing to the endoplasmic reticulum and/or cytosol of a cell in which the polypeptide is present, inhibiting a ribosome function, enzymatically inactivating a ribosome, causing cytostasis, and/or causing cytotoxicity. In some embodiments, the PD-L1 targeting molecule is capable of one or more the following: entering a cell, inhibiting a ribosome function, causing cytostasis, and/or causing cell death. In some embodiments, the PD-L1 targeting molecule is capable, when introduced to cells, of exhibiting a cytotoxicity comparable or better than a reference molecule, such as, e.g., a PD-L1 targeting molecule consisting of the PD-L1 targeting molecule except for all of its Shiga toxin effector polypeptide components comprise a wild-type Shiga toxin furin-cleavage site at the carboxy terminus of its A1 fragment region.

[0432] In some embodiments, the disrupted furin-cleavage site comprises one or more mutations, relative to a wild-type Shiga toxin A Subunit, the mutation altering at least one amino acid residue in a region natively positioned at 248-251 of the A Subunit of Shiga toxin (SEQ ID NOs: 1-2 and 4-6), or at 247-250 of the A Subunit of Shiga-like toxin 2 (SEQ ID NOs: 3 and 7-18), or the equivalent region in a Shiga toxin A Subunit or derivative thereof. In some embodiments, the disrupted furin-cleavage site comprises one or more mutations, relative to a wild-type Shiga toxin A Subunit, in a minimal furin cleavage site of the furin-cleavage site. In some embodiments the minimal furin cleavage site is represented by the consensus amino acid sequence R/Y-x-x-R (SEQ ID NO: 159) and/or R-x-x-R (SEQ ID NO: 160).

[0433] In some embodiments, the PD-L1 targeting molecule comprises a molecular moiety located carboxy-terminal to the carboxy-terminus of the Shiga toxin A1 fragment region.

[0434] In some embodiments, the binding region sterically covers the carboxy-terminus of the A1 fragment region.

[0435] In some embodiments, the molecular moiety sterically covers the carboxy-terminus of the A1 fragment region. In some embodiments, the molecular moiety comprises the binding region.

[0436] In some embodiments, the PD-L1 targeting molecule comprises a binding region and/or molecular moiety located carboxy-terminal to the carboxy-terminus of the Shiga toxin A1 fragment region. In some embodiments, the mass of the binding region and/or molecular moiety is at least 4.5 kDa, 6, kDa, 9 kDa, 12 kDa, 15 kDa, 20 kDa, 25 kDa, 28 kDa, 30 kDa, 41 kDa, 50 kDa, 100 kDa, or greater.

[0437] In some embodiments, the PD-L1 targeting molecule comprises a binding region with a mass of at least 4.5 kDa, 6, kDa, 9 kDa, 12 kDa, 15 kDa, 20 kDa, 25 kDa, 28 kDa, 30 kDa, 41 kDa, 50 kDa, 100 kDa, or greater, as long as the PD-L1 targeting molecule retains the appropriate level of the Shiga toxin biological activity noted herein (e.g., cytotoxicity and/or intracellular routing).

[0438] In some embodiments, the binding region is comprised within a relatively large, molecular moiety comprising such as, e.g., a molecular moiety with a mass of at least 4.5 kDa, 6, kDa, 9 kDa, 12 kDa, 15 kDa, 20 kDa, 25 kDa, 28 kDa, 30 kDa, 41 kDa, 50 kDa, 100 kDa, or greater, as long as the PD-L1 targeting molecule retains the appropriate level of the Shiga toxin biological activity noted herein.

[0439] In some embodiments, the disrupted furin-cleavage site comprises an amino acid residue substitution in the furin-cleavage site relative to a wild-type Shiga toxin A Subunit. In some embodiments, the substitution of the amino acid residue in the furin-cleavage site is of an arginine residue with a non-positively charged, amino acid residue selected from the group consisting of: alanine, glycine, proline, serine, threonine, aspartate, asparagine, glutamate, glutamine, cysteine, isoleucine, leucine, methionine, valine, phenylalanine, tryptophan, and tyrosine. In some embodiments, the substitution of the amino acid residue in the furin-cleavage site is of an arginine residue with a histidine.

[0440] In some embodiments, the PD-L1 targeting molecule is capable when introduced to cells of exhibiting cytotoxicity that is greater than that of a reference PD-L1 targeting molecule having an amino-terminus and comprising the binding region and the Shiga toxin effector polypeptide region which is not positioned at or proximal to the amino-terminus of the reference PD-L1 targeting molecule. In some embodiments, the PD-L1 targeting molecule is capable of exhibiting a cytotoxicity with better optimized, cytotoxic potency, such as, e.g., 4-fold, 5-fold, 6-fold, 9-fold, or greater cytotoxicity as compared to the reference PD-L1 targeting molecule. In some embodiments, the cytotoxicity of the PD-L1 targeting molecule to a population of target positive cells is 3-fold, 4-fold, 5-fold, 6-fold, 7-fold, 8-fold, 9-fold, 10-fold or greater than the cytotoxicity of the reference PD-L1 targeting molecule to a second population of target positive cells as assayed by CD₅₀ values.

[0441] In some embodiments, the PD-L1 targeting molecule is capable when introduced to a chordate of exhibiting improved, in vivo tolerability compared to in vivo tolerability of a reference PD-L1 targeting molecule consisting of the PD-L1 targeting molecule except for all of its Shiga toxin effector polypeptide component(s) each comprise a wild-type Shiga toxin A1 fragment and/or wild-type Shiga toxin furin-cleavage site at the carboxy terminus of its A1 fragment region.

[0442] In some embodiments, the PD-L1 targeting molecule is de-immunized due to the furin-cleavage site disruption. In some embodiments, the PD-L1 targeting molecule is capable of exhibiting less relative antigenicity and/or relative immunogenicity as compared to a reference PD-L1 targeting molecule consisting of the PD-L1 targeting molecule except for the furin-cleavage site is wild-type and/or all the Shiga toxin effector polypeptide components consist of a wild-type Shiga toxin A1 fragment.

[0443] In some embodiments, the PD-L1 targeting molecule is not cytotoxic and is capable when introduced to cells of exhibiting a greater subcellular routing efficiency from an extracellular space to a subcellular compartment of an endoplasmic reticulum and/or cytosol as compared to the cytotoxicity of a reference molecule, such as, e.g. a reference PD-L1 targeting molecule having an amino-terminus and comprising the binding region and the Shiga toxin effector polypeptide region which is not positioned at or proximal to the amino-terminus of the reference PD-L1 targeting molecule.

### PD-L1 Targeting Molecules Comprising a Carboxy-Terminal Endoplasmic Reticulum Retention/Retrieval Signal Motif and Shiga Toxin Effector Polypeptide at or Proximal to an Amino-Terminus of the Cell Targeting Molecule

[0444] Also provided herein are PD-L1 targeting molecules, each comprising (i) a binding region capable of specifically binding an extracellular part of a PD-L1 target molecule, (ii) a carboxy-terminal, endoplasmic reticulum retention/retrieval signal motif, and (iii) a Shiga toxin effector polypeptide; wherein the amino-terminus of the Shiga toxin effector polypeptide is at and/or proximal to an amino-terminus of a polypeptide component of the PD-L1 targeting molecule. In some embodiments, the PD-L1 targeting molecule comprises a (i) binding region capable of specifically binding an extracellular part of PD-L1, (ii) a carboxy-terminal, endoplasmic reticulum retention/retrieval signal motif of a member of the KDEL family, (iii) a polypeptide component, and (iv) a Shiga toxin effector polypeptide; wherein the amino-terminus of the Shiga toxin effector polypeptide is at and/or proximal to an amino-terminus of a polypeptide component of the PD-L1 targeting molecule. In some embodiments, the binding region and Shiga toxin effector polypeptide are physically arranged or oriented within the PD-L1 targeting molecule such that the binding region is not located proximally to the amino-terminus of the Shiga toxin effector polypeptide. In some embodiments, the binding region is located within the PD-L1 targeting molecule more proximal to the carboxy-terminus of the Shiga toxin effector polypeptide than to the amino-terminus of the Shiga toxin effector polypeptide. In some embodiments, the binding region is not located proximally to an amino-terminus of the PD-L1 targeting molecule relative to the Shiga toxin effector polypeptide.

[0445] In some embodiments, the Shiga toxin effector polypeptide is capable of exhibiting at least one Shiga toxin effector function, such as, e.g., directing intracellular routing to the endoplasmic reticulum and/or cytosol of a cell in which the polypeptide is present, inhibiting a ribosome function, enzymatically inactivating a ribosome, causing cytostasis, and/or causing cytotoxicity. In some embodiments, the PD-L1 targeting molecule is capable of one or more the following: entering a cell, inhibiting a ribosome function, causing cytostasis, and/or causing cell death.

[0446] In some embodiments, the carboxy-terminal endoplasmic reticulum retention/retrieval signal motif is selected from the group consisting of: KDEL (SEQ ID NO: 111), HDEF (SEQ ID NO: 112), HDEL (SEQ ID NO: 113), RDEF (SEQ ID NO:114), RDEL (SEQ ID NO: 115), WDEL (SEQ ID NO: 116), YDEL (SEQ ID NO: 117), HEEF (SEQ ID NO: 118), HEEL (SEQ ID NO: 119), KEEL (SEQ ID NO: 120), REEL (SEQ ID NO: 121), KAEL (SEQ ID NO: 122), KCEL (SEQ ID NO: 123), KFEL (SEQ ID NO: 124), KGEL (SEQ ID NO: 125), KHEL (SEQ ID NO: 126), KLEL (SEQ ID NO: 127), KNEL (SEQ ID NO: 128), KQEL (SEQ ID NO: 129), KREL (SEQ ID NO: 130), KSEL (SEQ ID NO: 131), KVEL (SEQ ID NO: 132), KWEL (SEQ ID NO: 133), KYEL (SEQ ID NO: 134), KEDL (SEQ ID NO: 135), KIEL (SEQ ID NO: 136), DKEL (SEQ ID NO: 137), FDEL (SEQ ID NO: 138), KDEF (SEQ ID NO: 139), KKEL (SEQ ID NO: 140), HADL (SEQ ID NO: 141), HAEL (SEQ ID NO: 142), HIEL (SEQ ID NO: 143), HNEL (SEQ ID NO: 144), HTEL (SEQ ID NO: 145), KTEL (SEQ ID NO: 146), HVEL (SEQ ID NO: 147), NDEL (SEQ ID NO: 148), QDEL (SEQ ID NO: 149), REDL (SEQ ID NO: 150), RNEL (SEQ ID NO: 151), RTDL (SEQ ID NO: 152), RTEL (SEQ ID NO: 153), SDEL (SEQ ID NO: 154), TDEL (SEQ ID NO: 155), SKEL (SEQ ID NO: 156), STEL (SEQ ID NO: 157), and EDEL (SEQ ID NO: 158).

[0447] In some embodiments, the PD-L1 targeting molecule is capable, when introduced to cells, of exhibiting cytotoxicity that is greater than that of a reference PD-L1 targeting molecule having an amino-terminus and comprising the binding region and the Shiga toxin effector polypeptide region which is not positioned at or proximal to the amino-terminus of the reference PD-L1 targeting molecule and/or greater than that of a second reference PD-L1 targeting molecule consisting of the PD-L1 targeting molecule except for it does not comprise any carboxy-terminal, endoplasmic reticulum retention/retrieval signal motif of the KDEL family. In some embodiments, the first reference PD-L1 targeting molecule does not comprise any carboxy-terminal, endoplasmic reticulum retention/retrieval signal motif of the KDEL family. In some embodiments, the PD-L1 targeting molecule is capable of exhibiting a cytotoxicity with better optimized, cytotoxic potency, such as, e.g., 4-fold, 5-fold, 6-fold, 9-fold, or greater cytotoxicity as compared to the first or second reference molecules. In some embodiments, the cytotoxicity of the PD-L1 targeting molecule to a population of target positive cells is 3-fold, 4-fold, 5-fold, 6-fold, 7-fold, 8-fold, 9-fold, 10-fold or greater than the cytotoxicity of the first and/or second reference PD-L1 targeting molecules to a second population of target positive cells as assayed by CD₅₀ values.

[0448] In some embodiments, the PD-L1 targeting molecule is not cytotoxic and is capable when introduced to cells of exhibiting a greater subcellular routing efficiency from an extracellular space to a subcellular compartment of an endoplasmic reticulum and/or cytosol as compared to the cytotoxicity of the first or second reference molecules.

### Multivalent PD-L1 Targeting Molecules

[0449] In some embodiments, the PD-L1 targeting molecule is multivalent. In some embodiments, the multivalent PD-L1 targeting molecule comprises two or more binding regions, wherein each binding region is capable of specifically binding an extracellular part of the same PD-L1 molecule. For some embodiments, upon administration of the multivalent PD-L1 targeting molecule to a population of cells physically coupled with target biomolecule, which have the extracellular part bound by two or more binding regions of the multivalent PD-L1 targeting molecule, results in a cytotoxic effect which is greater than a cytotoxic effect resulting from administration of an equivalent amount, mass, or molarity of a monovalent target-binding molecule component of the multivalent PD-L1 targeting molecule to a population of the same target-positive cells under same conditions by a factor of 2, 2.5, 3, 4, 5, 7.5, 10, or greater than the fold-change in target-binding between the monovalent target-binding molecule component and the multivalent PD-L1 targeting molecule as measured by dissociation constant (K_{D}). In some embodiments of the multivalent PD-L1 targeting molecule, at least one of the binding regions comprises a polypeptide comprising an immunoglobulin-type binding region which comprises a heavy chain variable region (HVR-H) comprising three CDRs, each having at least 85%, 90%, 91%, 92%, 93%, 94%, 95%, 96%, 97%, 98%, or 99% identity to SEQ ID NO:22, SEQ ID NO:23, SEQ ID NO:24, SEQ ID NO:36, or SEQ ID NO:37; or consisting essentially of an amino acid sequence show in any one of SEQ ID NO:22, SEQ ID NO:23, SEQ ID NO:24, SEQ ID NO:36, and SEQ ID NO:37. In some embodiments, the binding region further comprises: (a) a light chain variable region (HVR-L) comprising three CDRs, having at least 85%, 90%, 91%, 92%, 93%, 94%, 95%, 96%, 97%, 98%, or 99% identity to SEQ ID NO:19, SEQ ID NO:20, and SEQ ID NO:21; or consisting essentially of an amino acid sequence shown in any one of SEQ ID NO:19, SEQ ID NO:20, and SEQ ID NO:21. In some embodiments, the binding region comprises: (a) a light chain variable region (HVR-L) comprising three CDRs, each comprising or consisting essentially of an amino acid sequence shown in any one of SEQ ID NO:19, SEQ ID NO:20, and SEQ ID NO:21; and (b) a heavy chain variable region (HVR-H) comprising three CDRs, each comprising or consisting essentially of an amino acid sequence show in any one of SEQ ID NO:22, SEQ ID NO:23, SEQ ID NO:24, SEQ ID NO:36, and SEQ ID NO:37.

[0450] In some embodiments, at least one of the binding region comprises: (a) a light chain region having at least 85%, 90%, 91%, 92%, 93%, 94%, 95%, 96%, 97%, 98%, or 99%, identity to SEQ ID NO:25 or SEQ ID NO:27 or consisting essentially of the amino acid sequence of SEQ ID NO:25 or SEQ ID NO:27; and/or (b) a heavy chain region having at least 85%, 90%, 91%, 92%, 93%, 94%, 95%, 96%, 97%, 98%, or 99% identity to SEQ ID NO:26 or consisting essentially of the amino acid sequence of SEQ ID NO:26. In some embodiments, the binding region comprises a polypeptide having at least 85%, 90%, 91%, 92%, 93%, 94%, 95%, 96%, 97%, 98%, or 99% identity to any one of SEQ ID NOs: 28-35 and 38-40 or consists essentially of the polypeptide shown in any one of SEQ ID NOs: 28-35 and 38-40. In some embodiments, the binding region is a single-chain variable fragment, such as, e.g., consisting of, comprising, or consisting essentially of the polypeptide of any one of SEQ ID NOs: 28-35 and 38-40.

### Additional Embodiments

[0451] In some embodiments, the Shiga toxin effector polypeptide is fused to the binding region, either directly or indirectly, such as, e.g., via a linker known to the skilled worker.

[0452] In some embodiments, the binding region comprises a polypeptide comprising an immunoglobulin-type binding region. In some embodiments, the binding region is an immunoglobulin-type binding region capable of high-affinity and specific binding to PD-L1, such as, e.g., by binding to an extracellular part of a PD-L1 molecule. In some embodiments, the PD-L1 molecule is of human origin. In some embodiments, the binding region comprises a heavy chain variable region (HVR-H) comprising three CDRs, each having at least 85%, 90%, 91%, 92%, 93%, 94%, 95%, 96%, 97%, 98%, or 99% identity to SEQ ID NO:22, SEQ ID NO:23, SEQ ID NO:24, SEQ ID NO:36, or SEQ ID NO:37; or consisting essentially of an amino acid sequence show in any one of SEQ ID NO:22, SEQ ID NO:23, SEQ ID NO:24, SEQ ID NO:36, and SEQ ID NO:37. In some embodiments, the binding region further comprises: (a) a light chain variable region (HVR-L) comprising three CDRs, having at least 85%, 90%, 91%, 92%, 93%, 94%, 95%, 96%, 97%, 98%, or 99% identity to SEQ ID NO:19, SEQ ID NO:20, and SEQ ID NO:21; or consisting essentially of an amino acid sequence shown in any one of SEQ ID NO:19, SEQ ID NO:20, and SEQ ID NO:21. In some embodiments, the binding region comprises: (a) a light chain variable region (HVR-L) comprising three CDRs, each comprising or consisting essentially of an amino acid sequence shown in any one of SEQ ID NO:19, SEQ ID NO:20, and SEQ ID NO:21; and (b) a heavy chain variable region (HVR-H) comprising three CDRs, each comprising or consisting essentially of an amino acid sequence show in any one of SEQ ID NO:22, SEQ ID NO:23, SEQ ID NO:24, SEQ ID NO:36, and SEQ ID NO:37.

[0453] In some embodiments, the binding region comprises: (a) a light chain variable region (HVR-L) comprising three CDRs, each comprising or consisting essentially of an amino acid sequence shown in any one of SEQ ID NO:19, SEQ ID NO:20, and SEQ ID NO:21; and/or (b) a heavy chain variable region (HVR-H) comprising three CDRs, each comprising or consisting essentially of an amino acid sequence show in any one of SEQ ID NO:22, SEQ ID NO:23, SEQ ID NO:24, SEQ ID NO:36, and SEQ ID NO:37.

[0454] In some embodiments, the binding region comprises: (a) a light chain variable region comprising: (i) HVR-L1 comprising or consisting essentially of the amino acid sequence TGTSSDVGSYNRVS (SEQ ID NO:19), (ii) HVR-L2 comprising or consisting essentially of the amino acid sequence EVSNRPS (SEQ ID NO:20), and (iii) HVR-L3 comprising or consisting essentially of the amino acid sequence SSHTTSGTYV (SEQ ID NO:21); and/or (b) a heavy chain variable region comprising: (i) HVR-H1 comprising or consisting essentially of the amino acid sequence SYAIS (SEQ ID NO:22), (ii) HVR-H2 comprising or consisting essentially of the amino acid sequence GIIPIFGTANYAQKFQG (SEQ ID NO:23), and (iii) HVR-H3 comprising or consisting essentially of the amino acid sequence DQGYAHAFDI (SEQ ID NO:24).

[0455] In some embodiments, the binding region comprises: (a) a light chain variable region (HVR-L) comprising three CDRs: (i) a LCDR1 comprising or consisting essentially of the amino acid sequence TGTSSDVGSYNRVS as shown in SEQ ID NO:19, (ii) a LCDR2 comprising or consisting essentially of the amino acid sequence EVSNRPS as shown in SEQ ID NO:20, and (iii) a LCDR3 comprising or consisting essentially of the amino acid sequence SSHTTSGTYV as shown in SEQ ID NO:21; and/or (b) a heavy chain variable region (HVR-H) comprising: (i) a HCDR1 comprising or consisting essentially of the amino acid sequence GGTFSSY as shown in SEQ ID NO:22, (ii) a HCDR2 comprising or consisting essentially of the amino acid sequence IPIFGT as shown in SEQ ID NO:23, and (iii) a HCDR3 comprising or consisting essentially of the amino acid sequence DQGYAHAFDI as shown in SEQ ID NO:24.

[0456] In some embodiments, the binding region comprises: an immunoglobulin region comprising three CDRs comprising or consisting essentially of the amino acid sequences show in SEQ ID NO:22, SEQ ID NO:23, and SEQ ID NO:24, respectively.

[0457] In some embodiments, the binding region comprises an immunoglobulin region comprising three CDRs comprising or consisting essentially of the amino acid sequences show in SEQ ID NO:22, SEQ ID NO:37, and SEQ ID NO:24, respectively.

[0458] In some embodiments, the binding region comprises three CDRs comprising or consisting essentially of the amino acid sequences show in SEQ ID NO:36, SEQ ID NO:23, and SEQ ID NO:24, respectively.

[0459] In some embodiments, the binding region comprises an immunoglobulin region comprising three CDRs comprising or consisting essentially of the amino acid sequences show in SEQ ID NO:36, SEQ ID NO:37, and SEQ ID NO:24, respectively.

[0460] In some embodiments, the binding region comprises: (a) a light chain region having at least 85%, 90%, 91%, 92%, 93%, 94%, 95%, 96%, 97%, 98%, or 99%, identity to SEQ ID NO:25 or SEQ ID NO:27 or consisting essentially of the amino acid sequence of SEQ ID NO:25 or SEQ ID NO:27; and/or (b) a heavy chain region having at least 85%, 90%, 91%, 92%, 93%, 94%, 95%, 96%, 97%, 98%, or 99% identity to SEQ ID NO:26 or consisting essentially of the amino acid sequence of SEQ ID NO:26.

[0461] In some embodiments, the binding region comprises a polypeptide having at least 85%, 90%, 91%, 92%, 93%, 94%, 95%, 96%, 97%, 98%, or 99% identity to any one of SEQ ID NOs: 28-35 and 38-40 or consists essentially of the polypeptide shown in any one of SEQ ID NOs: 28-35 and 38-40.

[0462] In some embodiments, the binding region is a single-chain variable fragment, such as, e.g., consisting of, comprising, or consisting essentially of the polypeptide of any one of SEQ ID NOs: 28-35 and 38-40.

[0463] In some embodiments, the binding region comprises a polypeptide(s) selected from the group consisting of: (a) a heavy chain variable (V_{H}) domain comprising (i) a HCDR1 comprising or consisting essentially of the amino acid sequence as shown in SEQ ID NO:3 or SEQ ID NO:36; (ii) a HCDR2 comprising or consisting essentially of the amino acid sequence as shown in SEQ ID NO:20, 23, or 37; and/or (iii) a HCDR3 comprising or consisting essentially of the amino acid sequence as shown in SEQ ID NO:24; and/or (b) a light chain variable (V_{L}) domain comprising (i) a LCDR1 comprising or consisting essentially of the amino acid sequence as shown in SEQ ID NO:19; (ii) a LCDR2 comprising or consisting essentially of the amino acid sequence as shown in SEQ ID NO:20; and/or (iii) a LCDR3 comprising or consisting essentially of the amino acid sequence as shown in SEQ ID NO:21.

[0464] In some embodiments, a heterologous, CD8+ T-cell epitope-peptide cargo is fused, either directly or indirectly, to the Shiga toxin effector polypeptide and/or the binding region. In some embodiments of the PD-L1 targeting molecule, the CD8+ T-cell epitope-peptide cargo is fused via a peptide bond, either directly or indirectly, to the Shiga toxin A Subunit effector polypeptide and/or the binding region. In some embodiments, the CD8+ T-cell epitope-peptide cargo is fused via a peptide bond, either directly or indirectly, to the Shiga toxin A Subunit effector polypeptide and/or the binding region as a genetic fusion. In some embodiments, the PD-L1 targeting molecule comprises a single-chain polypeptide comprising the binding region, the Shiga toxin effector polypeptide, and the heterologous, CD8+ T-cell epitope-peptide cargo.

[0465] In some embodiments, the PD-L1 targeting molecule comprises a polypeptide comprising the binding region, the Shiga toxin effector polypeptide, and the CD8+ T-cell epitope-peptide cargo.

[0466] In some embodiments, the binding region comprises two or more polypeptide chains and a heterologous, CD8+ T-cell epitope-peptide cargo is fused either directly or indirectly, to a polypeptide comprising the Shiga toxin effector polypeptide and one of the two or more polypeptide chains of the binding region.

[0467] In some embodiments, the PD-L1 targeting molecule comprises a heterologous, CD8+ T-cell epitope-peptide cargo which is positioned within the PD-L1 targeting molecule carboxy-terminal to the Shiga toxin effector polypeptide and/or binding region. In some embodiments, the PD-L1 targeting molecule comprises two, three, four, five, or more heterologous, CD8+ T-cell epitope-peptide cargos positioned within the PD-L1 targeting molecule carboxy-terminal to the Shiga toxin effector polypeptide and/or binding region.

[0468] In some embodiments, the PD-L1 targeting molecule comprises a carboxy-terminal, heterologous, CD8+ T-cell epitope-peptide cargo.

[0469] In some embodiments, upon administration of the PD-L1 targeting molecule to a target cell physically coupled with an extracellular part of PD-L1 of the binding region, the PD-L1 targeting molecule is capable of causing intercellular engagement of the target cell by a CD8+ immune cell.

[0470] In some embodiments, upon administration of the PD-L1 targeting molecule to a target cell physically coupled with an extracellular part of PD-L1 bound by the binding region, the PD-L1 targeting molecule is capable of causing intercellular engagement of the target cell by a CD8+ immune cell. For some embodiments, upon administration of the PD-L1 targeting molecule to a target cell physically coupled with extracellular PD-L1 bound by the binding region, the PD-L1 targeting molecule is capable of causing death of the target cell. For some embodiments, upon administration of the PD-L1 targeting molecule to a first population of cells whose members are physically coupled to extracellular PD-L1 bound by the binding region, and a second population of cells whose members are not physically coupled to any extracellular target biomolecule bound by the binding region, the cytotoxic effect of the PD-L1 targeting molecule to members of said first population of cells relative to members of said second population of cells is at least 3-fold greater. In some embodiments, the Shiga toxin effector polypeptide comprises a mutation relative to a naturally occurring A Subunit of a member of the Shiga toxin family which changes the enzymatic activity of the Shiga toxin effector polypeptide, the mutation selected from at least one amino acid residue deletion, insertion, or substitution. In some embodiments, the mutation is selected from at least one amino acid residue deletion, insertion, or substitution that reduces or eliminates cytotoxicity of the toxin effector polypeptide. In some embodiments, the binding region comprises a heterologous, CD8+ T-cell epitope cargo, whether the CD8+ epitope-peptide is autogenous or heterologous with respect to the binding region.

[0471] In some embodiments, the PD-L1 targeting molecule may be used for targeted delivery of a CD8+ T-cell epitope to a nucleated, target cell within a chordate in order to cause the delivered CD8+ T-cell epitope-peptide cargo to be presented on the target cell surface complexed with a MHC class I molecule. The target cells can be of various types, such as, e.g., neoplastic cells, infected cells, cells harboring intracellular pathogens, and other undesirable cells, and the target cell can be targeted by PD-L1 targeting molecules either in vitro or in vivo.

[0472] In some embodiments, the PD-L1 targeting molecule comprises a heterologous, CD8+ T-cell epitope-peptide cargo for delivery to a target cell. For some embodiments, upon administration of the PD-L1 targeting molecule to a cell, which is physically coupled with extracellular PD-L1 bound by the binding region of the PD-L1 targeting molecule, results in the cell presenting on a cellular surface the CD8+ T-cell epitope-peptide cargo complexed with a MHC class I molecule. In some embodiments, having or placing the cell in the presence of an immune cell(s) further results in an immune cell response in trans, an inter-cellular engagement of the cell by an immune cell (e.g. a cytotoxic T lymphocyte), and/or death of the cell induced via an inter-cellular action(s) of an immune cell.

[0473] In some embodiments, the PD-L1 targeting molecule comprises a heterologous, CD8+ T-cell epitope-peptide cargo for delivery to a target cell. For some embodiments of the PD-L1 targeting molecule, upon administration of the PD-L1 targeting molecule to a chordate, which comprises cells physically coupled with extracellular PD-L1 bound by the binding region of the PD-L1 targeting molecule, results in at least some of said cells presenting on a cellular surface the CD8+ T-cell epitope-peptide cargo complexed with a MHC class I molecule. In some embodiments, the results further include an immune cell response in trans, such as, e.g., the inter-cellular engagement of at least some of said cells by an immune cell and/or death of the cell induced via an inter-cellular action(s) of an immune cell (e.g. a cytotoxic T lymphocyte).

[0474] In some embodiments, the Shiga toxin effector polypeptide has a Shiga toxin A1 fragment derived region having a carboxy terminus and further comprises a disrupted furin-cleavage site at the carboxy-terminus of the A1 fragment region.

[0475] In some embodiments, the PD-L1 targeting molecule comprises a molecular moiety located carboxy-terminal to the carboxy-terminus of the Shiga toxin A1 fragment region.

[0476] In some embodiments, the Shiga toxin effector polypeptide is capable of exhibiting at least one Shiga toxin effector function, such as, e.g., directing intracellular routing to the endoplasmic reticulum and/or cytosol of a cell in which the polypeptide is present, inhibiting a ribosome function, enzymatically inactivating a ribosome, causing cytostasis, and/or causing cytotoxicity. In some embodiments, the PD-L1 targeting molecule is capable of one or more the following: entering a cell, inhibiting a ribosome function, causing cytostasis, and/or causing cell death.

[0477] In some embodiments, the PD-L1 targeting molecule is capable of exhibiting (i) a catalytic activity level comparable to a wild-type Shiga toxin A1 fragment or wild-type Shiga toxin effector polypeptide, (ii) a ribosome inhibition activity with a half-maximal inhibitory concentration (IC₅₀) value of 10,000 picomolar or less, and/or (iii) a significant level of Shiga toxin catalytic activity.

[0478] In some embodiments, the PD-L1 targeting molecule is capable when introduced to cells of exhibiting a cytotoxicity with a half-maximal inhibitory concentration (CD₅₀) value of 300 nM or less and/or capable of exhibiting a significant level of Shiga toxin cytotoxicity.

[0479] In some embodiments, the PD-L1 targeting molecule exhibits low cytotoxic potency (i.e. is not capable when introduced to certain positive target cell types of exhibiting a cytotoxicity greater than 1% cell death of a cell population at a PD-L1 targeting molecule concentration of 1000 nM, 500 nM, 100 nM, 75 nM, or 50 nM).

[0480] In some embodiments, the Shiga toxin A Subunit effector polypeptide comprises one or more mutations relative to a naturally occurring A Subunit of a member of the Shiga toxin family which changes an enzymatic activity of the Shiga toxin A Subunit effector polypeptide, the mutation selected from at least one amino acid residue deletion, insertion, or substitution. For some embodiments, the mutation(s), relative to the naturally occurring A Subunit which changes an enzymatic activity of the Shiga toxin A Subunit effector polypeptide, reduces or eliminates a cytotoxicity exhibited by the Shiga toxin A Subunit effector polypeptide without the mutation(s).

[0481] In some embodiments, the PD-L1 targeting molecule, or a polypeptide component thereof, comprises a carboxy-terminal, endoplasmic reticulum retention/retrieval signal motif of a member of the KDEL family. For some embodiments, the carboxy-terminal endoplasmic reticulum retention/retrieval signal motif is selected from the group consisting of: KDEL (SEQ ID NO: 111), HDEF (SEQ ID NO: 112), HDEL (SEQ ID NO: 113), RDEF (SEQ ID NO:114), RDEL (SEQ ID NO: 115), WDEL (SEQ ID NO: 116), YDEL (SEQ ID NO: 117), HEEF (SEQ ID NO: 118), HEEL (SEQ ID NO: 119), KEEL (SEQ ID NO: 120), REEL (SEQ ID NO: 121), KAEL (SEQ ID NO: 122), KCEL (SEQ ID NO: 123), KFEL (SEQ ID NO: 124), KGEL (SEQ ID NO: 125), KHEL (SEQ ID NO: 126), KLEL (SEQ ID NO: 127), KNEL (SEQ ID NO: 128), KQEL (SEQ ID NO: 129), KREL (SEQ ID NO: 130), KSEL (SEQ ID NO: 131), KVEL (SEQ ID NO: 132), KWEL (SEQ ID NO: 133), KYEL (SEQ ID NO: 134), KEDL (SEQ ID NO: 135), KIEL (SEQ ID NO: 136), DKEL (SEQ ID NO: 137), FDEL (SEQ ID NO: 138), KDEF (SEQ ID NO: 139), KKEL (SEQ ID NO: 140), HADL (SEQ ID NO: 141), HAEL (SEQ ID NO: 142), HIEL (SEQ ID NO: 143), HNEL (SEQ ID NO: 144), HTEL (SEQ ID NO: 145), KTEL (SEQ ID NO: 146), HVEL (SEQ ID NO: 147), NDEL (SEQ ID NO: 148), QDEL (SEQ ID NO: 149), REDL (SEQ ID NO: 150), RNEL (SEQ ID NO: 151), RTDL (SEQ ID NO: 152), RTEL (SEQ ID NO: 153), SDEL (SEQ ID NO: 154), TDEL (SEQ ID NO: 155), SKEL (SEQ ID NO: 156), STEL (SEQ ID NO: 157), and EDEL (SEQ ID NO: 158). In some embodiments, the PD-L1 targeting molecule is capable, when introduced to cells, of exhibiting cytotoxicity that is greater than that of a reference molecule, such as, e.g., a second PD-L1 targeting molecule consisting of the PD-L1 targeting molecule except for it does not comprise any carboxy-terminal, endoplasmic reticulum retention/retrieval signal motif of the KDEL family.

[0482] In some embodiments, the Shiga toxin effector polypeptide further comprises at least one, two, or three disrupted, endogenous, B-cell and/or CD4+ T-cell epitope regions. In some embodiments, the Shiga toxin effector polypeptide comprises a disruption of at least one, two, or three endogenous, B-cell and/or T-cell epitopes and/or epitope regions. In some embodiments, the Shiga toxin effector polypeptide further comprises at least one disrupted, endogenous, B-cell and/or CD4+ T-cell epitope region which does not overlap with at least one inserted or embedded, heterologous epitope.

[0483] In some embodiments, the Shiga toxin effector polypeptide further comprises at least one inserted or embedded, heterologous epitope, such as, e.g., a CD8+ T-cell epitope.

[0484] In some embodiments, the amino-terminus of the Shiga toxin effector polypeptide is at and/or proximal to an amino-terminus of a polypeptide component of the PD-L1 targeting molecule. In some embodiments, the binding region is not located proximally to the amino-terminus of the PD-L1 targeting molecule relative to the Shiga toxin effector polypeptide. In some embodiments, the binding region and Shiga toxin effector polypeptide are physically arranged or oriented within the PD-L1 targeting molecule such that the binding region is not located proximally to the amino-terminus of the Shiga toxin effector polypeptide. In some embodiments, the binding region is located within the PD-L1 targeting molecule more proximal to the carboxy-terminus of the Shiga toxin effector polypeptide than to the amino-terminus of the Shiga toxin effector polypeptide. In some embodiments, the PD-L1 targeting molecule is not cytotoxic and is capable when introduced to cells of exhibiting a greater subcellular routing efficiency from an extracellular space to a subcellular compartment of an endoplasmic reticulum and/or cytosol as compared to the cytotoxicity of a reference molecule, such as, e.g., a second PD-L1 targeting molecule having an amino-terminus and comprising the binding region and the Shiga toxin effector polypeptide which is not positioned at or proximal to the amino-terminus of the reference PD-L1 targeting molecule. In some embodiments, the PD-L1 targeting molecule exhibits cytotoxicity with better optimized, cytotoxic potency, such as, e.g., 4-fold, 5-fold, 6-fold, 9-fold, or greater cytotoxicity as compared to the cytotoxicity of the second PD-L1 targeting molecule. In some embodiments, the reference PD-L1 targeting molecule does not comprise any carboxy-terminal, endoplasmic reticulum retention/retrieval signal motif of the KDEL family.

[0485] In some embodiments, the Shiga toxin effector polypeptide further comprises a disruption in the B-cell and/or T-cell epitope region selected from the group of natively positioned Shiga toxin A Subunit regions consisting of: 1-15 of any one of SEQ ID NOs: 1-2 and 4-6; 3-14 of any one of SEQ ID NOs: 3 and 7-18; 26-37 of any one of SEQ ID NOs: 3 and 7-18; 27-37 of any one of SEQ ID NOs: 1-2 and 4-6; 39-48 of any one of SEQ ID NOs: 1-2 and 4-6; 42-48 of any one of SEQ ID NOs: 3 and 7-18; and 53-66 of any one of SEQ ID NOs: 1-18; 94-115 of any one of SEQ ID NOs: 1-18; 141-153 of any one of SEQ ID NOs: 1-2 and 4-6; 140-156 of any one of SEQ ID NOs: 3 and 7-18; 179-190 of any one of SEQ ID NOs: 1-2 and 4-6; 179-191 of any one of SEQ ID NOs: 3 and 7-18; 204 of SEQ ID NO:3; 205 of any one of SEQ ID NOs: 1-2 and 4-6; and 210-218 of any one of SEQ ID NOs: 3 and 7-18; 240-260 of any one of SEQ ID NOs: 3 and 7-18; 243-257 of any one of SEQ ID NOs: 1-2 and 4-6; 254-268 of any one of SEQ ID NOs: 1-2 and 4-6; 262-278 of any one of SEQ ID NOs: 3 and 7-18; 281-297 of any one of SEQ ID NOs: 3 and 7-18; and 285-293 of any one of SEQ ID NOs: 1-2 and 4-6; or the equivalent region in a Shiga toxin A Subunit or derivative thereof. In some embodiments, there is no disruption which is a carboxy-terminal truncation of amino acid residues that overlap with part or all of at least one disrupted, endogenous, B-cell and/or T-cell epitope and/or epitope region.

[0486] In some embodiments, the Shiga toxin effector polypeptide further comprises a mutation, relative to a wild-type Shiga toxin A Subunit, in the B-cell immunogenic, amino acid residue selected from the group of natively positioned Shiga toxin A Subunit amino acid residues: L49, D197, D198, R204, and R205.

[0487] In some embodiments, the embedded or inserted, heterologous, T-cell epitope disrupts the endogenous, B-cell and/or T-cell epitope region is selected from the group of natively positioned Shiga toxin A Subunit regions consisting of: (i) 1-15 of any one of SEQ ID NOs: 1-2 and 4-6; 3-14 of any one of SEQ ID NOs: 3 and 7-18; 26-37 of any one of SEQ ID NOs: 3 and 7-18; 27-37 of any one of SEQ ID NOs: 1-2 and 4-6; 39-48 of any one of SEQ ID NOs: 1-2 and 4-6; 42-48 of any one of SEQ ID NOs: 3 and 7-18; and 53-66 of any one of SEQ ID NOs: 1-18, or the equivalent region in a Shiga toxin A Subunit or derivative thereof; (ii) 94-115 of any one of SEQ ID NOs: 1-18; 141-153 of any one of SEQ ID NOs: 1-2 and 4-6; 140-156 of any one of SEQ ID NOs: 3 and 7-18; 179-190 of any one of SEQ ID NOs: 1-2 and 4-6; 179-191 of any one of SEQ ID NOs: 3 and 7-18; 204 of SEQ ID NO:3; 205 of any one of SEQ ID NOs: 1-2 and 4-6; and 210-218 of any one of SEQ ID NOs: 3 and 7-18, or the equivalent region in a Shiga toxin A Subunit or derivative thereof; and (iii) 240-260 of any one of SEQ ID NOs: 3 and 7-18; 243-257 of any one of SEQ ID NOs: 1-2 and 4-6; 254-268 of any one of SEQ ID NOs: 1-2 and 4-6; 262-278 of any one of SEQ ID NOs: 3 and 7-18; 281-297 of any one of SEQ ID NOs: 3 and 7-18; and 285-293 of any one of SEQ ID NOs: 1-2 and 4-6, or the equivalent region in a Shiga toxin A Subunit or derivative thereof.

[0488] In some embodiments, the Shiga toxin effector polypeptide comprises a mutation, relative to a wild-type Shiga toxin A Subunit, in the B-cell and/or T-cell epitope region selected from the group of natively positioned Shiga toxin A Subunit regions consisting of: (i) 1-15 of any one of SEQ ID NOs: 1-2 and 4-6; 3-14 of any one of SEQ ID NOs: 3 and 7-18; 26-37 of any one of SEQ ID NOs: 3 and 7-18; 27-37 of any one of SEQ ID NOs: 1-2 and 4-6; 39-48 of any one of SEQ ID NOs: 1-2 and 4-6; 42-48 of any one of SEQ ID NOs: 3 and 7-18; and 53-66 of any one of SEQ ID NOs: 1-18, or the equivalent region in a Shiga toxin A Subunit or derivative thereof, wherein there is no disruption which is an amino-terminal truncation of sequences that overlap with part or all of at least one disrupted epitope region; (ii) 94-115 of any one of SEQ ID NOs: 1-18; 141-153 of any one of SEQ ID NOs: 1-2 and 4-6; 140-156 of any one of SEQ ID NOs: 3 and 7-18; 179-190 of any one of SEQ ID NOs: 1-2 and 4-6; 179-191 of any one of SEQ ID NOs: 3 and 7-18; 204 of SEQ ID NO:3; 205 of any one of SEQ ID NOs: 1-2 and 4-6; and 210-218 of any one of SEQ ID NOs: 3 and 7-18, or the equivalent region in a Shiga toxin A Subunit or derivative thereof, wherein there is no disruption which is an amino-terminal truncation of sequences that overlap with part or all of at least one disrupted epitope region.

[0489] In some embodiments, the Shiga toxin effector polypeptide comprises a disruption of at least one endogenous epitope region selected from the group of natively positioned Shiga toxin A Subunits consisting of: (ii) 94-115 of any one of SEQ ID NOs: 1-18; 141-153 of any one of SEQ ID NOs: 1-2 and 4-6; 140-156 of any one of SEQ ID NOs: 3 and 7-18; 179-190 of any one of SEQ ID NOs: 1-2 and 4-6; 179-191 of any one of SEQ ID NOs: 3 and 7-18; 204 of SEQ ID NO:3; 205 of any one of SEQ ID NOs: 1-2 and 4-6; and 210-218 of any one of SEQ ID NOs: 3 and 7-18, or the equivalent region in a Shiga toxin A Subunit or derivative thereof.

[0490] In some embodiments, the Shiga toxin effector polypeptide comprises disruptions of at least four, five, six, seven, eight, or more endogenous, B-cell and/or T-cell epitope regions.

[0491] In some embodiments, one or more disruptions comprises an amino acid residue substitution relative to a wild-type Shiga toxin A Subunit.

[0492] In some embodiments, one or more endogenous, B-cell and/or T-cell epitope regions comprises a plurality of amino acid residue substitutions relative to a wild-type Shiga toxin A Subunit.

[0493] In some embodiments, at least one, two, three, or four disruptions comprise a plurality of amino acid residue substitutions in the endogenous, B-cell and/or T-cell epitope region relative to a wild-type Shiga toxin A Subunit.

[0494] In some embodiments, at least one disruption comprises at least one, two, three, four, five, six, seven, eight, or more amino acid residue substitutions relative to a wild-type Shiga toxin A Subunit, and optionally wherein at least one substitution occurs at the natively positioned Shiga toxin A Subunit amino acid residue selected form the group consisting of: 1 of SEQ ID NO:1 or SEQ ID NO:2; 4 of SEQ ID NO:1, SEQ ID NO:2, or SEQ ID NO:3; 6 of SEQ ID NO:1, SEQ ID NO:2, or SEQ ID NO:3; 8 of SEQ ID NO:1, SEQ ID NO:2, or SEQ ID NO:3; 9 of SEQ ID NO:1, SEQ ID NO:2, or SEQ ID NO:3; 11 of SEQ ID NO:1, SEQ ID NO:2, or SEQ ID NO:3; 12 of SEQ ID NO:1, SEQ ID NO:2, or SEQ ID NO:3; 33 of SEQ ID NO:1 or SEQ ID NO:2; 43 of SEQ ID NO:1 or SEQ ID NO:2; 44 of SEQ ID NO:1 or SEQ ID NO:2; 45 of SEQ ID NO:1 or SEQ ID NO:2; 46 of SEQ ID NO:1, SEQ ID NO:2, or SEQ ID NO:3; 47 of SEQ ID NO:1 or SEQ ID NO:2; 48 of SEQ ID NO:1, SEQ ID NO:2, or SEQ ID NO:3; 49 of SEQ ID NO:1, SEQ ID NO:2, or SEQ ID NO:3; 50 of SEQ ID NO:1 or SEQ ID NO:2; 51 of SEQ ID NO:1 or SEQ ID NO:2; 53 of SEQ ID NO:1 or SEQ ID NO:2; 54 of SEQ ID NO:1, SEQ ID NO:2, or SEQ ID NO:3; 55 of SEQ ID NO:1 or SEQ ID NO:2; 56 of SEQ ID NO:1, SEQ ID NO:2, or SEQ ID NO:3; 57 of SEQ ID NO:1, SEQ ID NO:2, or SEQ ID NO:3; 58 of SEQ ID NO:1, SEQ ID NO:2, or SEQ ID NO:3; 59 of SEQ ID NO:1, SEQ ID NO:2, or SEQ ID NO:3; 60 of SEQ ID NO:1 or SEQ ID NO:2; 61 of SEQ ID NO:1 or SEQ ID NO:2; 62 of SEQ ID NO:1 or SEQ ID NO:2; 84 of SEQ ID NO:1 or SEQ ID NO:2; 88 of SEQ ID NO:1, SEQ ID NO:2, or SEQ ID NO:3; 94 of SEQ ID NO:1, SEQ ID NO:2, or SEQ ID NO:3; 96 of SEQ ID NO:1, SEQ ID NO:2, or SEQ ID NO:3; 104 of SEQ ID NO:1 or SEQ ID NO:2; 105 of SEQ ID NO:1 or SEQ ID NO:2; 107 of SEQ ID NO:1, SEQ ID NO:2, or SEQ ID NO:3; 108 of SEQ ID NO:1 or SEQ ID NO:2; 109 of SEQ ID NO:1, SEQ ID NO:2, or SEQ ID NO:3; 110 of SEQ ID NO:1 or SEQ ID NO:2; 111 of SEQ ID NO:1, SEQ ID NO:2, or SEQ ID NO:3; 112 of SEQ ID NO:1, SEQ ID NO:2, or SEQ ID NO:3; 141 of SEQ ID NO:1, SEQ ID NO:2, or SEQ ID NO:3; 147 of SEQ ID NO:1, SEQ ID NO:2, or SEQ ID NO:3; 154 of SEQ ID NO:1 or SEQ ID NO:2; 179 of SEQ ID NO:1, SEQ ID NO:2, or SEQ ID NO:3; 180 of SEQ ID NO:1 or SEQ ID NO:2; 181 of SEQ ID NO:1 or SEQ ID NO:2; 183 of SEQ ID NO:1, SEQ ID NO:2, or SEQ ID NO:3; 184 of SEQ ID NO:1, SEQ ID NO:2, or SEQ ID NO:3; 185 of SEQ ID NO:1 or SEQ ID NO:2; 186 of SEQ ID NO:1, SEQ ID NO:2, or SEQ ID NO:3; 187 of SEQ ID NO:1 or SEQ ID NO:2; 188 of SEQ ID NO:1 or SEQ ID NO:2; 189 of SEQ ID NO:1 or SEQ ID NO:2; 197 of SEQ ID NO:3; 198 of SEQ ID NO:1 or SEQ ID NO:2; 204 of SEQ ID NO:3; 205 of SEQ ID NO:1 or SEQ ID NO:2; 247 of SEQ ID NO:1 or SEQ ID NO:2; 247 of SEQ ID NO:3; 248 of SEQ ID NO:1 or SEQ ID NO:2; 250 of SEQ ID NO:3; 251 of SEQ ID NO:1 or SEQ ID NO:2; 264 of SEQ ID NO:1, SEQ ID NO:2, or SEQ ID NO:3; 265 of SEQ ID NO:1 or SEQ ID NO:2; and 286 of SEQ ID NO:1 or SEQ ID NO:2; or the equivalent amino acid residue in a Shiga toxin A Subunit or derivative thereof. In some embodiments, at least two disruptions each comprise at least one amino acid residue substitutions relative to a wild-type Shiga toxin A Subunit selected form the group consisting of: 1 of SEQ ID NO:1 or SEQ ID NO:2; 4 of SEQ ID NO:1, SEQ ID NO:2, or SEQ ID NO:3; 8 of SEQ ID NO:1, SEQ ID NO:2, or SEQ ID NO:3; 9 of SEQ ID NO:1, SEQ ID NO:2, or SEQ ID NO:3; 11 of SEQ ID NO:1, SEQ ID NO:2, or SEQ ID NO:3; 33 of SEQ ID NO:1 or SEQ ID NO:2; 43 of SEQ ID NO:1 or SEQ ID NO:2; 45 of SEQ ID NO:1 or SEQ ID NO:2; 47 of SEQ ID NO:1 or SEQ ID NO:2; 48 of SEQ ID NO:1, SEQ ID NO:2, or SEQ ID NO:3; 49 of SEQ ID NO:1 or SEQ ID NO:2; 53 of SEQ ID NO:1 or SEQ ID NO:2; 55 of SEQ ID NO:1 or SEQ ID NO:2; 58 of SEQ ID NO:1, SEQ ID NO:2, or SEQ ID NO:3; 59 of SEQ ID NO:1, SEQ ID NO:2, or SEQ ID NO:3; 60 of SEQ ID NO:1 or SEQ ID NO:2; 61 of SEQ ID NO:1 or SEQ ID NO:2; 62 of SEQ ID NO:1 or SEQ ID NO:2; 94 of SEQ ID NO:1, SEQ ID NO:2, or SEQ ID NO:3; 96 of SEQ ID NO:1, SEQ ID NO:2, or SEQ ID NO:3; 109 of SEQ ID NO:1, SEQ ID NO:2, or SEQ ID NO:3; 110 of SEQ ID NO:1 or SEQ ID NO:2; 112 of SEQ ID NO:1, SEQ ID NO:2, or SEQ ID NO:3; 147 of SEQ ID NO:1, SEQ ID NO:2, or SEQ ID NO:3; 179 of SEQ ID NO:1, SEQ ID NO:2, or SEQ ID NO:3; 180 of SEQ ID NO:1 or SEQ ID NO:2; 181 of SEQ ID NO:1 or SEQ ID NO:2; 183 of SEQ ID NO:1, SEQ ID SEQ ID NO:2, or SEQ ID NO:3; 184 of SEQ ID NO:1, SEQ ID NO:2, or SEQ ID NO:3; 185 of SEQ ID NO:1 or SEQ ID NO:2; 186 of SEQ ID NO:1, SEQ ID NO:2, or SEQ ID NO:3; 187 of SEQ ID NO:1 or SEQ ID NO:2; 188 of SEQ ID NO:1 or SEQ ID NO:2; 189 of SEQ ID NO:1 or SEQ ID NO:2; 204 of SEQ ID NO:3; 205 of SEQ ID NO:1 or SEQ ID NO:2; 247 of SEQ ID NO:1 or SEQ ID NO:2; 247 of SEQ ID NO:3; 250 of SEQ ID NO:3; 264 of SEQ ID NO:1, SEQ ID NO:2, or SEQ ID NO:3; 265 of SEQ ID NO:1 or SEQ ID NO:2; and 286 of SEQ ID NO:1 or SEQ ID NO:2; or the equivalent amino acid residue in a Shiga toxin A Subunit or derivative thereof.

[0495] In some embodiments, the Shiga toxin effector polypeptide comprises disruption of at least three, endogenous, B-cell and/or T-cell epitope regions selected from the group of consisting of: (i) 1-15 of any one of SEQ ID NOs: 1-2 and 4-6; 3-14 of any one of SEQ ID NOs: 3 and 7-18; 26-37 of any one of SEQ ID NOs: 3 and 7-18; 27-37 of any one of SEQ ID NOs: 1-2 and 4-6; 39-48 of any one of SEQ ID NOs: 1-2 and 4-6; 42-48 of any one of SEQ ID NOs: 3 and 7-18; and 53-66 of any one of SEQ ID NOs: 1-18, or the equivalent region in a Shiga toxin A Subunit or derivative thereof, wherein there is no disruption which is an amino-terminal truncation of amino acid residues that overlap with part or all of at least one disrupted, endogenous, B-cell and/or T-cell epitope region; (ii) 94-115 of any one of SEQ ID NOs: 1-18; 141-153 of any one of SEQ ID NOs: 1-2 and 4-6; 140-156 of any one of SEQ ID NOs: 3 and 7-18; 179-190 of any one of SEQ ID NOs: 1-2 and 4-6; 179-191 of any one of SEQ ID NOs: 3 and 7-18; 204 of SEQ ID NO:3; 205 of any one of SEQ ID NOs: 1-2 and 4-6; and 210-218 of any one of SEQ ID NOs: 3 and 7-18, or the equivalent region in a Shiga toxin A Subunit or derivative thereof, wherein there is no disruption which is a carboxy-terminal truncation of amino acid residues that overlap with part or all of at least one disrupted, endogenous, B-cell and/or T-cell epitope and/or epitope region.

[0496] In some embodiments, the Shiga toxin effector polypeptide comprises disruptions of at least two, endogenous, B-cell and/or T-cell epitope regions, wherein each disruption comprises one or more amino acid residue substitutions, and wherein the endogenous, B-cell and/or T-cell epitope regions are selected from the group of natively positioned Shiga toxin A Subunit regions consisting of: 3-14 of any one of SEQ ID NOs: 3 and 7-18; 26-37 of any one of SEQ ID NOs: 3 and 7-18; 27-37 of any one of SEQ ID NOs: 1-2 and 4-6; 39-48 of any one of SEQ ID NOs: 1-2 and 4-6; 42-48 of any one of SEQ ID NOs: 3 and 7-18; 53-66 of any one of SEQ ID NOs: 1-18; or the equivalent region in a Shiga toxin A Subunit or derivative thereof.

[0497] In some embodiments, the embedded or inserted, heterologous, T-cell epitope does not disrupt any endogenous, B-cell and/or CD4+ T-cell epitope region described herein.

[0498] In some embodiments, at least one disruption comprises one or more amino acid residue substitutions relative to a wild-type Shiga toxin A Subunit is selected from the group consisting of: D to A, D to G, D to V, D to L, D to I, D to F, D to S, D to Q, D to M, D to R, E to A, E to G, E to V, E to L, E to I, E to F, E to S, E to Q, E to N, E to D, E to M, E to R, F to A, F to G, F to V, F to L, F to I, G to A, G to P, H to A, H to G, H to V, H to L, H to I, H to F, H to M, I to A, I to V, I to G, I to C, K to A, K to G, K to V, K to L, K to I, K to M, K to H, L to A, L to V, L to G, L to C, N to A, N to G, N to V, N to L, N to I, N to F, P to A, P to G, P to F, R to A, R to G, R to V, R to L, R to I, R to F, R to M, R to Q, R to S, R to K, R to H, S to A, S to G, S to V, S to L, S to I, S to F, S to M, T to A, T to G, T to V, T to L, T to I, T to F, T to M, T to S, V to A, V to G, Y to A, Y to G, Y to V, Y to L, Y to I, Y to F, Y to M, and Y to T. In some embodiments, the one or more amino acid residue substitutions relative to a wild-type Shiga toxin A Subunit is selected from the group consisting of: D to A, D to G, D to V, D to L, D to I, D to F, D to S, D to Q, E to A, E to G, E to V, E to L, E to I, E to F, E to S, E to Q, E to N, E to D, E to M, E to R, G to A, H to A, H to G, H to V, H to L, H to I, H to F, H to M, K to A, K to G, K to V, K to L, K to I, K to M, K to H, L to A, L to G, N to A, N to G, N to V, N to L, N to I, N to F, P to A, P to G, P to F, R to A, R to G, R to V, R to L, R to I, R to F, R to M, R to Q, R to S, R to K, R to H, S to A, S to G, S to V, S to L, S to I, S to F, S to M, T to A, T to G, T to V, T to L, T to I, T to F, T to M, T to S, Y to A, Y to G, Y to V, Y to L, Y to I, Y to F, and Y to M.

[0499] In some embodiments, at least one of the disruption(s) comprises one or more amino acid residue substitutions relative to a wild-type Shiga toxin A Subunit selected from the group consisting of: K1 to A, G, V, L, I, F, M and H; T4 to A, G, V, L, I, F, M, and S; D6 to A, G, V, L, I, F, S, Q and R; S8 to A, G, V, I, L, F, and M; T9 to A, G, V, I, L, F, M, and S; S9 to A, G, V, L, I, F, and M; K11 to A, G, V, L, I, F, M and H; T12 to A, G, V, I, L, F, M, S, and K; S12 to A, G, V, I, L, F, and M; S33 to A, G, V, L, I, F, M, and C; S43 to A, G, V, L, I, F, and M; G44 to A or L; S45 to A, G, V, L, I, F, and M; T45 to A, G, V, L, I, F, and M; G46 to A and P; D47 to A, G, V, L, I, F, S, M, and Q; N48 to A, G, V, L, M and F; L49 to A, V, C, and G; Y49 to A, G, V, L, I, F, M, and T; F50 to A, G, V, L, I, and T; A51; D53 to A, G, V, L, I, F, S, and Q; V54 to A, G, I, and L; R55 to A, G, V, L, I, F, M, Q, S, K, and H; G56 to A and P; 157 to A, G, V, and M; L57 to A, V, C, G, M, and F; D58 to A, G, V, L, I, F, S, and Q; P59 to A, G, and F; E60 to A, G, V, L, I, F, S, Q, N, D, M, T, and R; E61 to A, G, V, L, I, F, S, Q, N, D, M, and R; G62 to A; R84 to A, G, V, L, I, F, M, Q, S, K, and H; V88 to A and G; I88 to A, V, C, and G; D94 to A, G, V, L, I, F, S, and Q; S96 to A, G, V, I, L, F, and M; T104 to A, G, V, L, I, F, M; and N; A105 to L; T107 to A, G, V, L, I, F, M, and P; S107 to A, G, V, L, I, F, M, and P; L108 to A, V, C, and G; S109 to A, G, V, I, L, F, and M; T109 to A, G, V, I, L, F, M, and S; G110 to A; S112 to A, G, V, L, I, F, and M; D111 to A, G, V, L, I, F, S, Q, and T; S112 to A, G, V, L, I, F, and M; D141 to A, G, V, L, I, F, S, and Q; G147 to A; V154 to A and G. R179 to A, G, V, L, I, F, M, Q, S, K, and H; T180 to A, G, V, L, I, F, M, and S; T181 to A, G, V, L, I, F, M, and S; D183 to A, G, V, L, I, F, S, and Q; D184 to A, G, V, L, I, F, S, and Q; L185 to A, G, V and C; S186 to A, G, V, I, L, F, and M; G187 to A; R188 to A, G, V, L, I, F, M, Q, S, K, and H; S189 to A, G, V, I, L, F, and M; D197 to A, G, V, L, I, F, S, and Q; D198 to A, G, V, L, I, F, S, and Q; R204 to A, G, V, L, I, F, M, Q, S, K, and H; R205 to A, G, V, L, I, F, M, Q, S, K and H; S247 to A, G, V, I, L, F, and M; Y247 to A, G, V, L, I, F, and M; R248 to A, G, V, L, I, F, M, Q, S, K, and H; R250 to A, G, V, L, I, F, M, Q, S, K, and H; R251 to A, G, V, L, I, F, M, Q, S, K, and H; D264 to A, G, V, L, I, F, S, and Q; G264 to A; and T286 to A, G, V, L, I, F, M, and S.

[0500] In some embodiments, the PD-L1 targeting molecule is capable when introduced to a chordate of exhibiting improved in vivo tolerability and/or stability compared to a reference molecule, such as, e.g., a second PD-L1 targeting molecule consisting of the PD-L1 targeting molecule except for all of its Shiga toxin effector polypeptide component(s) each comprise a wild-type Shiga toxin A1 fragment and/or wild-type Shiga toxin furin-cleavage site at the carboxy terminus of its A1 fragment region. In some embodiments, the Shiga toxin effector polypeptide is not cytotoxic and the molecular moiety is cytotoxic.

[0501] In some embodiments, the binding region comprises a polypeptide selected from the group consisting of: autonomous V_{H} domains, single-domain antibody domains (sdAbs), heavy-chain antibody domains derived from camelids (V_{H}H fragments or V_{H} domain fragments), heavy-chain antibody domains derived from camelid V_{H}H fragments or V_{H} domain fragments, heavy-chain antibody domains derived from cartilaginous fishes, immunoglobulin new antigen receptors (IgNARs), V_{NAR} fragments, single-chain variable (scFv) fragments, nanobodies, Fd fragments consisting of the heavy chain and C_{H}1 domains, single chain Fv-C_{H}3 minibodies, dimeric C_{H}2 domain fragments (C_{H}2D), Fc antigen binding domains (Fcabs), isolated complementary determining region 3 (CDR3) fragments, constrained framework region 3, CDR3, framework region 4 (FR3-CDR3-FR4) polypeptides, small modular immunopharmaceutical (SMIP) domains, scFv-Fc fusions, multimerizing scFv fragments (diabodies, triabodies, tetrabodies), disulfide stabilized antibody variable (Fv) fragments, disulfide stabilized antigen-binding (Fab) fragments consisting of the V_{L}, V_{H}, C_{L} and C_{H}1 domains, bivalent nanobodies, bivalent minibodies, bivalent F(ab′)₂ fragments (Fab dimers), bispecific tandem V_{H}H fragments, bispecific tandem scFv fragments, bispecific nanobodies, bispecific minibodies, and any genetically manipulated counterparts of the foregoing that retain its paratope and binding functionality.

[0502] In some embodiments, the PD-L1 targeting molecule and/or its Shiga toxin effector polypeptide is capable of exhibiting subcellular routing efficiency comparable to a reference PD-L1 targeting molecule comprising a wild-type Shiga toxin A1 fragment or wild-type Shiga toxin effector polypeptide and/or capable of exhibiting a significant level of intracellular routing activity to the endoplasmic reticulum and/or cytosol from an endosomal starting location of a cell.

[0503] In some embodiments, whereby administration of the PD-L1 targeting molecule to a cell physically coupled with the extracellular target biomolecule of the PD-L1 targeting molecule's binding region, the PD-L1 targeting molecule is capable of causing death of the cell. In some embodiments, administration of the PD-L1 targeting molecule to two different populations of cell types which differ with respect to the presence or level of the extracellular target biomolecule, the PD-L1 targeting molecule is capable of causing cell death to the cell-types physically coupled with extracellular PD-L1 bound by the cytotoxic PD-L1 targeting molecule's binding region at a CD₅₀ at least three times or less than the CD₅₀ to cell types which are not physically coupled with an extracellular PD-L1 bound by the PD-L1 targeting molecule's binding region. In some embodiments, whereby administration of the PD-L1 targeting molecule to a first populations of cells whose members are physically coupled to PD-L1 bound by the PD-L1 targeting molecule's binding region, and a second population of cells whose members are not physically coupled to any extracellular PD-L1 bound by the binding region, the cytotoxic effect of the PD-L1 targeting molecule to members of said first population of cells relative to members of said second population of cells is at least 3-fold greater. For some embodiments, whereby administration of the PD-L1 targeting molecule to a first populations of cells whose members are physically coupled to a significant amount of the PD-L1 bound by the PD-L1 targeting molecule's binding region, and a second population of cells whose members are not physically coupled to a significant amount of any PD-L1 bound by the binding region, the cytotoxic effect of the PD-L1 targeting molecule to members of said first population of cells relative to members of said second population of cells is at least 3-fold greater. In some embodiments, whereby administration of the PD-L1 targeting molecule to a first population of target biomolecule positive cells, and a second population of cells whose members do not express a significant amount of a target biomolecule of the PD-L1 targeting molecule's binding region at a cellular surface, the cytotoxic effect of the PD-L1 targeting molecule to members of the first population of cells relative to members of the second population of cells is at least 3-fold greater.

[0504] In some embodiments, the PD-L1 targeting molecule is capable of delivering an embedded or inserted, heterologous, CD8+ T-cell epitope to a MHC class I presentation pathway of a cell for cell-surface presentation of the epitope bound by a MHC class I molecule.

[0505] In some embodiments, the PD-L1 targeting molecule is capable of delivering heterologous, CD8+ T-cell epitope (which is neither embedded nor inserted in the Shiga toxin effector polypeptide) to a MHC class I presentation pathway of a cell for cell-surface presentation of the epitope bound by a MHC class I molecule. In some embodiments, the heterologous, T-cell epitope is a CD8+ T-cell epitope, such as, e.g., with regard to a human immune system. In some embodiments, the heterologous, T-cell epitope is capable of being presented by a MHC class I molecule of a cell. In some embodiments, the PD-L1 targeting molecule is capable of one or more the following: entering a cell, inhibiting a ribosome function, causing cytostasis, causing cell death, and/or delivering the embedded or inserted, heterologous, T-cell epitope to a MHC class I molecule for presentation on a cellular surface.

[0506] In some embodiments, the PD-L1 targeting molecule comprises a molecular moiety associated with the carboxy-terminus of the Shiga toxin effector polypeptide. In some embodiments, the molecular moiety comprises or consists of the binding region. In some embodiments, the molecular moiety comprises at least one amino acid and the Shiga toxin effector polypeptide is linked to at least one amino acid residue of the molecular moiety. In some embodiments, the molecular moiety and the Shiga toxin effector polypeptide are fused forming a continuous polypeptide.

[0507] In some embodiments, the PD-L1 targeting molecule further comprises a cytotoxic molecular moiety associated with the carboxy-terminus of the Shiga toxin effector polypeptide. For some embodiments, the cytotoxic molecular moiety is a cytotoxic agent, such as, e.g., a small molecule chemotherapeutic agent, anti-neoplastic agent, cytotoxic antibiotic, alkylating agent, antimetabolite, topoisomerase inhibitor, and/or tubulin inhibitor known to the skilled worker and/or described herein. For some embodiments, the cytotoxic molecular moiety is cytotoxic at concentrations of less than 10,000, 5,000, 1,000, 500, or 200 pM.

[0508] In some embodiments, the binding region is linked, either directly or indirectly, to the Shiga toxin effector polypeptide by at least one covalent bond which is not a disulfide bond. In some embodiments, the binding region is fused, either directly or indirectly, to the carboxy-terminus of the Shiga toxin effector polypeptide to form a single, continuous polypeptide. In some embodiments, the binding region is an immunoglobulin-type binding region.

[0509] In some embodiments, the disrupted furin-cleavage site comprises one or more mutations in the minimal, furin-cleavage site relative to a wild-type Shiga toxin A Subunit. In some embodiments, the disrupted furin-cleavage site is not an amino-terminal truncation of sequences that overlap with part or all of at least one amino acid residue of the minimal furin-cleavage site. In some embodiments, the mutation in the minimal, furin-cleavage site is an amino acid deletion, insertion, and/or substitution of at least one amino acid residue in the R/Y-x-x-R furin cleavage site (SEQ ID NO: 159). In some embodiments, the disrupted furin-cleavage site comprises at least one mutation relative to a wild-type Shiga toxin A Subunit, the mutation altering at least one amino acid residue in the region natively positioned at 248-251 of the A Subunit of Shiga toxin (SEQ ID NOs: 1-2 and 4-6), or at 247-250 of the A Subunit of Shiga-like toxin 2 (SEQ ID NOs: 3 and 7-18), or the equivalent amino acid sequence position in any Shiga toxin A Subunit. In some embodiments, the mutation is an amino acid residue substitution of an arginine residue with a non-positively charged, amino acid residue.

[0510] In some embodiments, the PD-L1 targeting molecule is capable when introduced to cells of exhibiting cytotoxicity comparable to a cytotoxicity of a reference molecule, such as, e.g., a second PD-L1 targeting molecule consisting of the PD-L1 targeting molecule except for all of its Shiga toxin effector polypeptide component(s) each comprise a wild-type Shiga toxin A1 fragment.

[0511] In some embodiments, the PD-L1 targeting molecule comprises any one of SEQ ID NOs: 1-83.

[0512] In some embodiments, one or more binding region(s) comprises the peptide or polypeptide shown in any one of SEQ ID NOs: 19-40.

[0513] In some embodiments, two or more binding regions comprise the peptide or polypeptide shown in any one of SEQ ID NOs: 19-40. In some embodiments, two or more binding regions each comprise the same peptide or polypeptide shown in any one of SEQ ID NOs: 19-40.

[0514] Some embodiments of the PD-L1 targeting molecule comprise or consist essentially of the polypeptide represented by the amino acid sequence shown in any one of SEQ ID NOs: 84-166 or 188-256.

[0515] In some embodiments, at least one binding region sterically covers the carboxy-terminus of the A1 fragment region.

[0516] In some embodiments, the molecular moiety sterically covers the carboxy-terminus of the A1 fragment region. In some embodiments, the molecular moiety comprises the binding region.

[0517] In some embodiments, the PD-L1 targeting molecule comprises a binding region and/or molecular moiety located carboxy-terminal to the carboxy-terminus of the Shiga toxin A1 fragment region. In some embodiments, the mass of the binding region and/or molecular moiety is at least 4.5 kDa, 6, kDa, 9 kDa, 12 kDa, 15 kDa, 20 kDa, 25 kDa, 28 kDa, 30 kDa, 41 kDa, 50 kDa, 100 kDa, or greater.

[0518] In some embodiments, the PD-L1 targeting molecule comprises a binding region with a mass of at least 4.5 kDa, 6, kDa, 9 kDa, 12 kDa, 15 kDa, 20 kDa, 25 kDa, 28 kDa, 30 kDa, 41 kDa, 50 kDa, 100 kDa, or greater, as long as the PD-L1 targeting molecule retains the appropriate level of the Shiga toxin biological activity noted herein (e.g., cytotoxicity and/or intracellular routing).

[0519] In some embodiments, the binding region is comprised within a relatively large, molecular moiety comprising such as, e.g., a molecular moiety with a mass of at least 4.5 kDa, 6, kDa, 9 kDa, 12 kDa, 15 kDa, 20 kDa, 25 kDa, 28 kDa, 30 kDa, 41 kDa, 50 kDa, 100 kDa, or greater, as long as the PD-L1 targeting molecule retains the appropriate level of the Shiga toxin biological activity noted herein.

[0520] In some embodiments, the PD-L1 targeting molecule exhibits low cytotoxic potency (i.e. is not capable when introduced to certain positive target cell types of exhibiting a cytotoxicity greater than 1% cell death of a cell population at a PD-L1 targeting molecule concentration of 1000 nM, 500 nM, 100 nM, 75 nM, or 50 nM) and is capable when introduced to cells of exhibiting a greater subcellular routing efficiency from an extracellular space to a subcellular compartment of an endoplasmic reticulum and/or cytosol as compared to the cytotoxicity of a reference molecule, such as, e.g., a second PD-L1 targeting molecule having an amino-terminus and comprising the binding region and the Shiga toxin effector polypeptide which is not positioned at or proximal to the amino-terminus of the third PD-L1 targeting molecule. In some embodiments, the reference PD-L1 targeting molecule does not comprise any carboxy-terminal, endoplasmic reticulum retention/retrieval signal motif of the KDEL family.

[0521] In some embodiments, the molecular moiety comprises a peptide and/or polypeptide derived from the Shiga toxin A2 fragment of a naturally occurring Shiga toxin.

[0522] The embodiments are not intended to cover any naturally occurring Shiga holotoxin. In some embodiments, the PD-L1 targeting molecule does not comprise a naturally occurring Shiga toxin B Subunit. In some embodiments, the PD-L1 targeting molecule does not comprise any polypeptide comprising or consisting essentially of a functional binding domain of a native Shiga toxin B subunit. Rather, in some embodiments, the Shiga toxin A Subunit derived regions are functionally associated with heterologous binding regions to effectuate PD-L1 targeting.

[0523] In some embodiments, the target cell is not a professional antigen presenting cell, such as a dendritic cell type.

[0524] In some embodiments, the Shiga toxin effector polypeptide comprises at least two, embedded or inserted, heterologous epitopes.

[0525] In some embodiments, the Shiga toxin effector polypeptide comprises one or more mutations relative to a naturally occurring A Subunit of a member of the Shiga toxin family which changes an enzymatic activity of the Shiga toxin effector polypeptide, the mutation selected from at least one amino acid residue deletion, insertion, or substitution. In some embodiments, the mutation relative to the naturally occurring A Subunit reduces of eliminates a cytotoxic activity of the Shiga toxin effector polypeptide but the Shiga toxin effector polypeptide retains at least one other Shiga toxin effector function, such as, e.g., promoting cellular internalization and/or directing intracellular routing to a certain subcellular compartment(s). In some embodiments, the mutation relative to the naturally occurring A Subunit is selected from at least one amino acid residue substitution, such as, e.g., A231E, N75A, Y77S, Y114S, E167D, R170A, R176K, W202A, and/or W203A in any one of SEQ ID NOs: 1-18.

[0526] In some embodiments, the Shiga toxin effector polypeptide is capable of: (i) routing to a subcellular compartment of a cell in which the Shiga toxin effector polypeptide is present selected from the following: cytosol, endoplasmic reticulum, and lysosome; (ii) intracellular delivery of the epitope-cargo from an early endosomal compartment to a proteasome of a cell in which the Shiga toxin effector polypeptide is present; and/or (iii) intracellular delivery of the epitope to a MHC class I molecule from an early endosomal compartment of a cell in which the Shiga toxin effector polypeptide is present. In some embodiments, the Shiga toxin effector polypeptide is capable of intracellular delivery of the CD8+ T-cell epitope for presentation by a MHC class I molecule on the surface of a cell in which the Shiga toxin effector polypeptide is present.

[0527] Also provided herein are pharmaceutical compositions comprising a PD-L1 targeting molecule and at least one pharmaceutically acceptable excipient or carrier; and the use of such a PD-L1 targeting molecule, or a composition comprising it, in methods described herein. Some embodiments are pharmaceutical compositions comprising any PD-L1 targeting molecule; and at least one pharmaceutically acceptable excipient or carrier.

[0528] Also provided herein is a diagnostic composition comprising any one of the above PD-L1 targeting molecules and a detection promoting agent for the collection of information, such as diagnostically useful information about a cell-type, tissue, organ, disease, disorder, condition, and/or patient. In some embodiments, the detection promoting agent is a heterologous epitope-peptide cargo and the PD-L1 targeting molecule comprises the heterologous epitope-peptide cargo.

[0529] Beyond the PD-L1 targeting molecules and compositions, polynucleotides capable of encoding a PD-L1 targeting molecule, or a protein component thereof, are also contemplated herein, as well as expression vectors which comprise a polynucleotide and host cells comprising an expression vector described herein. Host cells comprising an expression vector may be used, e.g., in methods for producing a PD-L1 targeting molecule, or a protein component or fragment thereof, by recombinant expression.

[0530] In some embodiments, any composition of matter described herein may be immobilized on a solid substrate. Such arrangements of the compositions of matter may be utilized, e.g., in methods of screening molecules as described herein.

[0531] In some embodiments, a method of delivering into a cell a CD8+ T-cell epitope-peptide cargo capable of being presented by a MHC class I molecule of the cell comprises the step of contacting the cell with the PD-L1 targeting molecule and/or a composition thereof (e.g., a pharmaceutical or diagnostic composition).

[0532] Among some embodiments is a method of inducing a cell to present an exogenously administered CD8+ T-cell epitope-peptide cargo complexed to a MHC class I molecule, the method comprising the step of contacting the cell, either in vitro or in vivo, with the PD-L1 targeting molecule, which comprises the CD8+ T-cell epitope, and/or a composition thereof (e.g., a pharmaceutical or diagnostic composition comprising such a PD-L1 targeting molecule).

[0533] Among some embodiments is a method of inducing an immune cell-mediated response to target cell via a CD8+ T-cell epitope MHC class I molecule complex, the method comprising the step of contacting the target cell either in vitro or in vivo, with the PD-L1 targeting molecule, which comprises the CD8+ T-cell epitope as a cargo, and/or a composition thereof (e.g., a pharmaceutical or diagnostic composition comprising such a PD-L1 targeting molecule). For some embodiments, the immune response is selected from the group consisting: CD8+ immune cell secretion of a cytokine(s), cytotoxic T lymphocyte-(CTL) induced growth arrest in the target cell, CTL-induced necrosis of the target cell, CTL-induced apoptosis of the target cell, immune cell-mediated cell killing of a cell other than the target cell.

[0534] In some embodiments, a method of causing intercellular engagement of a CD8+ immune cell with a target cell comprises the step of contacting the target cell with the PD-L1 targeting molecule in the presence of a CD8+ immune cell or with the subsequent step of contacting the target cell with one or more CD8+ immune cells. For some embodiments, the contacting step occurs in vitro. For certain other embodiments, the contacting step occurs in vivo, such as, e.g., by administering the PD-L1 targeting molecule to a chordate, vertebrate, and/or mammal. For some embodiments, the intercellular engagement occurs in vitro. For some embodiments, the intercellular engagement occurs in vivo.

[0535] In some embodiments, a composition comprises a PD-L1 targeting molecule for “seeding” a tissue locus within a chordate.

[0536] In some embodiments, a method for “seeding” a tissue locus within a chordate comprises the step of: administering to the chordate a PD-L1 targeting molecule, or a pharmaceutical composition comprising the same. For some embodiments, the method is for “seeding” a tissue locus within a chordate which comprises a malignant, diseased, and/or inflamed tissue. For some embodiments, the method is for “seeding” a tissue locus within a chordate which comprises the tissue selected from the group consisting of: diseased tissue, tumor mass, cancerous growth, tumor, infected tissue, or abnormal cellular mass. For some embodiments, the method for “seeding” a tissue locus within a chordate comprises the step of: administering to the chordate a PD-L1 targeting molecule comprising a heterologous, CD8+ T-cell epitope-peptide cargo selected from the group consisting of: peptides not natively presented by the target cells of the PD-L1 targeting molecule in MHC class I complexes, peptides not natively present within any protein expressed by the target cell, peptides not natively present within the transcriptome and/or proteome of the target cell, peptides not natively present in the extracellular microenvironment of the site to be seeded, and peptides not natively present in the tumor mass or infected tissue site to be targeted.

[0537] Additionally, provided herein are methods of killing a cell(s) comprising the step of contacting a cell(s) with a PD-L1 targeting molecule or a pharmaceutical composition comprising a PD-L1 targeting molecule. In some embodiments, the step of contacting the cell(s) occurs in vitro. In some embodiments, the step of contacting the cell(s) occurs in vivo. In some embodiments, the method is capable of selectively killing cell(s) and/or cell-types preferentially over other cell(s) and/or cell-types when contacting a mixture of cells which differ with respect to the extracellular presence and/or expression level of extracellular PD-L1 bound by the binding region of the PD-L1 targeting molecule.

[0538] Also provided herein are methods of treating diseases, disorders, and/or conditions in patients in need thereof comprising the step of administering to a patient in need thereof a therapeutically effective amount of a composition comprising a PD-L1 targeting molecule or pharmaceutical composition comprising the same. In some embodiments, the disease, disorder, or condition to be treated is selected from: a cancer, tumor, growth abnormality, immune disorder, or microbial infection. In some embodiments, the cancer to be treated is selected from the group consisting of: bone cancer, breast cancer, central/peripheral nervous system cancer, gastrointestinal cancer, germ cell cancer, glandular cancer, head-neck cancer, hematological cancer, kidney-urinary tract cancer, liver cancer, lung/pleura cancer, prostate cancer, sarcoma, skin cancer, and uterine cancer. In some embodiments, the immune disorder to be treated is an immune disorder associated with a disease selected from the group consisting of: amyloidosis, ankylosing spondylitis, asthma, Crohn's disease, diabetes, graft rejection, graft-versus-host disease, Hashimoto's thyroiditis, hemolytic uremic syndrome, HIV-related diseases, lupus erythematosus, multiple sclerosis, polyarteritis nodosa, polyarthritis, psoriasis, psoriatic arthritis, rheumatoid arthritis, scleroderma, septic shock, Sjorgren's syndrome, ulcerative colitis, and vasculitis.

[0539] Also provided herein is a composition comprising a PD-L1 targeting molecule for the treatment or prevention of a cancer, tumor, growth abnormality, immune disorder, or microbial infection. In some embodiments, provided herein is use of a composition of matter as described herein in the manufacture of a medicament for the treatment or prevention of a cancer, tumor, growth abnormality, immune disorder, or microbial infection.

[0540] The use of any composition described for the treatment or prevention of a cancer, tumor, growth abnormality, and/or immune disorder is contemplated by the disclosure.

[0541] In some embodiments, a method of treating cancer in a patient using immunotherapy comprises the step of administering to the patient in need thereof the PD-L1 targeting molecule and/or a pharmaceutical composition comprising the same.

[0542] Any composition of matter described herein may be used for the treatment or prevention of a cancer, tumor, growth abnormality, and/or immune disorder. In some embodiments, a PD-L1 targeting molecule and/or a pharmaceutical composition comprising the same is used for the treatment or prevention of a cancer, tumor, growth abnormality, immune disorder, and/or microbial infection. In some embodiments, provided herein is the use of a PD-L1 targeting molecule and/or pharmaceutical composition thereof in the manufacture of a medicament for the treatment or prevention of a cancer, tumor, growth abnormality, immune disorder, or microbial infection.

[0543] In some embodiments, a composition comprising a PD-L1 targeting molecule is for the delivery of one or more additional exogenous materials into a cell physically coupled with PD-L1 bound by the binding region of the PD-L1 targeting molecule. Some embodiments of the PD-L1 targeting molecules may be used to deliver one or more additional exogenous materials into a cell physically coupled with PD-L1 bound by the binding region of the PD-L1 targeting molecule. Additionally, in some embodiments, a method for delivering exogenous material to the inside of a cell(s) comprises contacting the cell(s), either in vitro or in vivo, with a PD-L1 targeting molecule, pharmaceutical composition, and/or diagnostic composition. Also provided herein is a method for delivering exogenous material to the inside of a cell(s) in a patient in need thereof, the method comprising the step of administering to the patient a PD-L1 targeting molecule, wherein the target cell(s) is physically coupled with PD-L1 bound by the binding region of the PD-L1 targeting molecule.

[0544] The use of any composition described herein (e.g. a PD-L1 targeting molecule, a pharmaceutical composition, or diagnostic composition) for the diagnosis, prognosis, and/or characterization of a disease, disorder, and/or condition is also contemplated.

[0545] In some embodiments, a method of detecting a cell using a PD-L1 targeting molecule and/or diagnostic composition comprises the steps of contacting a cell with said PD-L1 targeting molecule and/or diagnostic composition and detecting the presence of said PD-L1 targeting molecule and/or diagnostic composition. In some embodiments, the step of contacting the cell(s) occurs in vitro. In some embodiments, the step of contacting the cell(s) occurs in vivo. In some embodiments, the step of detecting the cell(s) occurs in vitro. In some embodiments, the step of detecting the cell(s) occurs in vivo.

[0546] For example, a diagnostic composition may be used to detect a cell in vivo by administering to a chordate subject a composition comprising PD-L1 targeting molecule which comprises a detection promoting agent and then detecting the presence of the PD-L1 targeting molecule and/or a heterologous, CD8+ T-cell epitope-peptide cargo (of the PD-L1 targeting molecule) either in vitro or in vivo.

[0547] Some embodiments of the PD-L1 targeting molecules may be utilized for the delivery of additional exogenous material into a cell physically coupled with PD-L1 bound by the PD-L1 targeting molecule. Additionally, provided herein is a method for delivering exogenous material to the inside of a cell(s) comprising contacting the cell(s), either in vitro or in vivo, with a PD-L1 targeting molecule, pharmaceutical composition, and/or diagnostic composition. Also provided herein is a method for delivering exogenous material to the inside of a cell(s) in a patient, the method comprising the step of administering to the patient a PD-L1 targeting molecule (with or without cytotoxic activity), wherein the target cell(s) is physically coupled with PD-L1 bound by the PD-L1 targeting molecule.

[0548] In some embodiments, a method of delivering into a cell a T-cell epitope-peptide cargo capable of being presented by a MHC class I molecule of the cell comprises the step of contacting the cell with the PD-L1 targeting molecule which is associated with a heterologous, T-cell epitope-peptide cargo and/or a composition thereof (e.g., a pharmaceutical or diagnostic composition).

[0549] Also provided herein is a method for “seeding” a tissue locus within a chordate, the method comprising the step of: administering to the chordate a PD-L1 targeting molecule, or a pharmaceutical or a diagnostic composition thereof. In some embodiments, the methods for “seeding” a tissue locus are for “seeding” a tissue locus which comprises a malignant, diseased, or inflamed tissue. In some embodiments, the methods for “seeding” a tissue locus are for “seeding” a tissue locus which comprises the tissue selected from the group consisting of: diseased tissue, tumor mass, cancerous growth, tumor, infected tissue, or abnormal cellular mass. In some embodiments, the methods for “seeding” a tissue locus comprises administering to the chordate the PD-L1 targeting molecule, the pharmaceutical composition, or the diagnostic composition comprising a heterologous, T-cell epitope-peptide cargo selected from the group consisting of: peptides not natively presented by the target cells of the PD-L1 targeting molecule in MEW class I complexes, peptides not natively present within any protein expressed by the target cell, peptides not natively present within the proteome of the target cell, peptides not natively present in the extracellular microenvironment of the site to be seeded, and peptides not natively present in the tumor mass or infected tissue site to be targeted.

[0550] The use of any composition of matter described herein for the diagnosis, prognosis, and/or characterization of a disease, disorder, and/or condition is contemplated. In some embodiments, a method of using a PD-L1 targeting molecule comprising a detection promoting agent and/or composition (e.g. a diagnostic composition) for the collection of information useful in the diagnosis, prognosis, or characterization of a disease, disorder, or condition. Among some embodiments is the method of detecting a cell (or subcellular compartment thereof) using a PD-L1 targeting molecule and/or diagnostic composition, the method comprising the steps of contacting a cell with the PD-L1 targeting molecule and/or diagnostic composition and detecting the presence of said PD-L1 targeting molecule and/or diagnostic composition. In some embodiments, the step of contacting the cell(s) occurs in vitro. In some embodiments, the step of contacting the cell(s) occurs in vivo. In some embodiments, the step of detecting the cell(s) occurs in vitro. In some embodiments, the step of detecting the cell(s) occurs in vivo. In some embodiments, the method involves the detection of the location of the PD-L1 targeting molecule in an organism using one or more imaging procedures after the administration of the PD-L1 targeting molecule to said organism. For example, PD-L1 targeting molecules which incorporate detection promoting agents as described herein may be used to characterize diseases as potentially treatable by a related pharmaceutical composition. For example, certain PD-L1 targeting molecules and compositions thereof (e.g. pharmaceutical compositions and diagnostic compositions), and methods may be used to determine if a patient belongs to a group that responds to a pharmaceutical composition described herein. For example, certain PD-L1 targeting molecules and compositions thereof may be used to identify cells which present a delivered heterologous epitope-peptide cargo on a cellular surface and/or to identify subjects containing cells which present a heterologous epitope-peptide cargo delivered by a PD-L1 targeting.

[0551] Also provided is a method of producing a molecule described herein, the method comprising the step of purifying the molecule or a polypeptide component of thereof using a bacterial cell-wall protein domain interaction, such as, e.g., protein L from P. magnus or derivatives and binding domain fragments thereof. In some embodiments, the purifying step of the method involves the Shiga toxin effector polypeptide comprising or consisting essentially of any one of the polypeptides shown in SEQ ID NOs: 1-18, 41-69 and 261-284.

[0552] Also provided herein are kits comprising a composition of matter described herein, and optionally, instructions for use, additional reagent(s), and/or pharmaceutical delivery device(s). The kit may further comprise reagents and other tools for detecting a cell type (e.g. a tumor cell) in a sample or in a subject.

### A. Cell-Kill Via Shiga Toxin a Subunit Cytotoxicity

[0553] In some embodiments, the Shiga toxin effector polypeptides and/or PD-L1 targeting molecules are cytotoxic. Some embodiments of the PD-L1 targeting molecules are cytotoxic only due to the presence of one or more Shiga toxin effector polypeptide components. The A Subunits of members of the Shiga toxin family each comprise an enzymatically active polypeptide region capable of killing a eukaryotic cell once in the cell's cytosol. Because members of the Shiga toxin family are adapted to killing eukaryotic cells, molecules derived from Shiga toxins, such as, e.g., PD-L1 targeting molecules comprising some embodiments of the Shiga toxin effector polypeptides can exhibit potent cell-kill activities.

[0554] In some embodiments, upon contacting a cell physically coupled with PD-L1 bound by the binding region of the PD-L1 targeting molecule (e.g. a PD-L1 positive cell), the PD-L1 targeting molecule is capable of causing death of the cell. In some embodiments, the CD₅₀ value of the PD-L1 targeting molecule is less than 5, 2.5, 1, 0.5, or 0.25 nM, which is vastly more potent than an untargeted, wild-type, Shiga toxin effector polypeptide (e.g., SEQ ID NOs: 1-18).

[0555] Cell-kill may be accomplished using a molecule under varied conditions of target cells, such as, e.g., an ex vivo manipulated target cell, a target cell cultured in vitro, a target cell within a tissue sample cultured in vitro, or a target cell in an in vivo setting like within a multicellular organism.

[0556] In some embodiments, the Shiga toxin effector polypeptides and PD-L1 targeting molecules comprise (1) a de-immunized, Shiga toxin effector sub-region, (2) a protease-cleavage resistant region near the carboxy-terminus of a Shiga toxin A1 fragment derived region, (3) a carboxy-terminal, endoplasmic reticulum retention/retrieval signal motif; and/or (4) a heterologous, T-cell epitope embedded or inserted region; however, for some embodiments, these structural modifications do not significantly alter the potency of Shiga toxin cytotoxicity as compared to reference molecules comprising a wild-type Shiga toxin A Subunit polypeptide, such as, e.g., a wild-type Shiga toxin A1 fragment. Thus, Shiga toxin effector polypeptides and PD-L1 targeting molecules which are de-immunized, protease cleavage resistant, and/or carrying embedded or inserted, heterologous, epitopes can maintain potent cytotoxicity while providing one or more various other functionalities or properties.

[0557] Already cytotoxic PD-L1 targeting molecules comprising Shiga toxin effector polypeptides may be engineered by the skilled worker using the information and methods provided herein to be more cytotoxic and/or to have redundant, backup cytotoxicities operating via completely different mechanisms. These multiple cytotoxic mechanisms may complement each other by their diversity of functions (such as by providing potent killing via two mechanisms of cell-killing, direct and indirect, as well as mechanisms of immuno-stimulation to the local area), redundantly backup each other (such as by providing one cell-killing mechanism in the absence of the other mechanisms—like if a target cell is resistant to or acquires some immunity to a subset of previously active mechanisms), and/or protect against developed resistance (by limiting resistance to the less probable situation of the malignant or infected cell blocking multiple, different cell-killing mechanisms simultaneously).

[0558] In some embodiments, cytotoxic PD-L1 targeting molecules comprising cytotoxic Shiga toxin effector polypeptides are effective at in vivo target cell killing independent of a subject's immune function status because these molecules function via the mechanism of action involving the inhibition of protein synthesis.

### B. Delivery of a T-Cell Epitope for MEW Class I Presentation on a Cell Surface

[0559] In some embodiments, the Shiga toxin effector polypeptides and PD-L1 targeting molecules comprise a T-cell epitope, which enables the engineering of “T-cell epitope delivering” molecules with virtually unlimited choices of epitope-peptide cargos for delivery and cell-surface presentation by a nucleated, chordate cell. In some embodiments, the Shiga toxin effector polypeptides and PD-L1 targeting molecules are each capable of delivering one or more T-cell epitopes, associated with the Shiga toxin effector polypeptides and/or PD-L1 targeting molecules, to the proteasome of a cell. The delivered T-cell epitope are then proteolytic processed and presented by the MHC class I pathway on the surface of the cell. By engineering MHC class I epitopes into PD-L1 targeting molecules, the targeted delivery and presentation of immuno-stimulatory antigens may be accomplished in order to harness and direct a beneficial function(s) of a chordate immune system.

[0560] In some embodiments, the Shiga toxin effector polypeptide or PD-L1 targeting molecule is capable of delivering a T-cell epitope to a MHC class I molecule of a cell for cell-surface presentation. In some embodiments, the Shiga toxin effector polypeptide or PD-L1 targeting molecule comprises a heterologous, T-cell epitope, whether as an additional exogenous material or embedded or inserted within a Shiga toxin effector polypeptide. In some embodiments, the Shiga toxin effector polypeptide or PD-L1 targeting molecule is capable of delivering an embedded or inserted T-cell epitope to a MHC class I molecule for cell-surface presentation.

[0561] In some embodiments, the Shiga toxin effector polypeptide is capable of delivering a T-cell epitope, which is embedded or inserted in the Shiga toxin effector polypeptide, to a MHC class I molecule of a cell in which the Shiga toxin effector polypeptide is present for presentation of the T-cell epitope by the MHC class I molecule on a surface of the cell. In some embodiments, the T-cell epitope is a heterologous, T-cell epitope. In some embodiments, the T-cell epitope functions as CD8+ T-cell epitope, whether already known or identified in the future using methods which are currently routine to the skilled worker.

[0562] In some embodiments, the PD-L1 targeting molecule is capable of delivering a T-cell epitope, which is associated with the PD-L1 targeting molecule, to a MHC class I molecule of a cell for presentation of the T-cell epitope by the MHC class I molecule on a surface of the cell. In some embodiments, the T-cell epitope is a heterologous, T-cell epitope which is embedded or inserted in the Shiga toxin effector polypeptide. In some embodiments, the T-cell epitope functions as CD8+ T-cell epitope, whether already known or identified in the future using methods which are currently routine to the skilled worker.

[0563] In some embodiments, upon contacting a cell with the PD-L1 targeting molecule, the PD-L1 targeting molecule is capable of delivering a T-cell epitope-peptide, which is associated with the PD-L1 targeting molecule, to a MHC class I molecule of the cell for presentation of the T-cell epitope-peptide by the MHC class I molecule on a surface of the cell. In some embodiments, the T-cell epitope-peptide is a heterologous epitope which is embedded or inserted in a Shiga toxin effector polypeptide. In some embodiments, the T-cell epitope-peptide functions as CD8+ T-cell epitope, whether already known or identified in the future using methods which are currently routine to the skilled worker.

[0564] The addition of a heterologous epitope into or presence of a heterologous epitope in a PD-L1 targeting molecule, whether as an additional exogenous material or embedded or inserted within a Shiga toxin effector polypeptide, enables methods of using such PD-L1 targeting molecules for the cell-targeted delivery of a chosen epitope for cell-surface presentation by a nucleated, target cell within a chordate.

[0565] One function of certain, CD8+ T-cell hyper-immunized, Shiga toxin effector polypeptides and PD-L1 targeting molecules is the delivery of one or more T-cell epitope-peptides to a MHC class I molecule for MHC class I presentation by a cell. Delivery of exogenous, T-cell epitope-peptides to the MHC class I system of a target cell can be used to induce the target cell to present the T-cell epitope-peptide in association with MHC class I molecules on the cell surface, which subsequently leads to the activation of CD8+ effector T-cells to attack the target cell.

[0566] The skilled worker, using techniques known in the art, can associate, couple, and/or link certain, Shiga toxin effector polypeptides to various other PD-L1 targeting binding regions to create PD-L1 targeting molecules which target specific, extracellular, target biomolecules physically coupled to cells and promote target-cell internalization of these PD-L1 targeting molecules. All nucleated vertebrate cells are believed to be capable of presenting intracellular epitopes using the MHC class I system. Thus, extracellular target biomolecules of the PD-L1 targeting molecules may in principle target any nucleated vertebrate cell for T-cell epitope delivery to a MHC class I presentation pathway of such a cell.

[0567] The epitope-delivering functions of the Shiga toxin effector polypeptides and PD-L1 targeting molecules can be detected and monitored by a variety of standard methods known in the art to the skilled worker and/or described herein. For example, the ability of PD-L1 targeting molecules to deliver a T-cell epitope-peptide and drive presentation of the epitope-peptide by the MHC class I system of target cells may be investigated using various in vitro and in vivo assays, including, e.g., the direct detection/visualization of MHC class I/peptide complexes, measurement of binding affinities for the heterologous, T-cell epitope-peptide to MHC class I molecules, and/or measurement of functional consequences of MHC class I-peptide complex presentation on target cells by monitoring cytotoxic T-lymphocyte (CTL) responses (see e.g. Examples, infra).

[0568] Certain assays to monitor this function of the polypeptides and molecules of involve the direct detection of a specific MHC class I/peptide antigen complex in vitro or ex vivo. Common methods for direct visualization and quantitation of peptide-MHC class I complexes involve various immuno-detection reagents known to the skilled worker. For example, specific monoclonal antibodies can be developed to recognize a particular MHC/class I/peptide antigen complex. Similarly, soluble, multimeric T cell receptors, such as the TCR-STAR reagents (Altor Bioscience Corp., Mirmar, Fla., U.S.) can be used to directly visualize or quantitate specific MHC I/antigen complexes (Zhu X et al., J Immunol 176: 3223-32 (2006)). These specific mAbs or soluble, multimeric T-cell receptors may be used with various detection methods, including, e.g. immunohistochemistry, flow cytometry, and enzyme-linked immuno assay (ELISA).

[0569] An alternative method for direct identification and quantification of MHC I/peptide complexes involves mass spectrometry analyses, such as, e.g., the ProPresent Antigen Presentation Assay (ProImmune, Inc., Sarasota, Fla., U.S.) in which peptide-MCH class I complexes are extracted from the surfaces of cells, then the peptides are purified and identified by sequencing mass spectrometry (Falk K et al., Nature 351: 290-6 (1991)).

[0570] In certain assays to monitor the T-cell epitope delivery and MHC class I presentation function of the polypeptides and molecules involve computational and/or experimental methods to monitor MHC class I and peptide binding and stability. Several software programs are available for use by the skilled worker for predicting the binding responses of peptides to MHC class I alleles, such as, e.g., The Immune Epitope Database and Analysis Resource (IEDB) Analysis Resource MHC-I binding prediction Consensus tool (Kim Y et al., Nucleic Acid Res 40: W525-30 (2012). Several experimental assays have been routinely applied, such as, e.g., cell surface binding assays and/or surface plasmon resonance assays to quantify and/or compare binding kinetics (Miles K et al., Mol Immunol 48: 728-32 (2011)). Additionally, other MHC-peptide binding assays based on a measure of the ability of a peptide to stabilize the ternary MHC-peptide complex for a given MHC class I allele, as a comparison to known controls, have been developed (e.g., MHC-peptide binding assay from ProImmmune, Inc.).

[0571] Alternatively, measurements of the consequence of MHC class I/peptide antigen complex presentation on the cell surface can be performed by monitoring the cytotoxic T-cell (CTL) response to the specific complex. These measurements by include direct labeling of the CTLs with MHC class I tetramer or pentamer reagents. Tetramers or pentamers bind directly to T cell receptors of a particular specificity, determined by the Major Histocompatibility Complex (MHC) allele and peptide complex. Additionally, the quantification of released cytokines, such as interferon gamma or interleukins by ELISA or enzyme-linked immunospot (ELIspot) is commonly assayed to identify specific CTL responses. The cytotoxic capacity of CTL can be measured using a number of assays, including the classical 51 Chromium (Cr) release assay or alternative non-radioactive cytotoxicity assays (e.g., CytoTox96® non-radioactive kits and CellTox™ CellTiter-GLO® kits available from Promega Corp., Madison, Wis., U.S.), Granzyme B ELISpot, Caspase Activity Assays or LAMP-1 translocation flow cytometric assays. To specifically monitor the killing of target cells, carboxyfluorescein diacetate succinimidyl ester (CFSE) can be used to easily and quickly label a cell population of interest for in vitro or in vivo investigation to monitor killing of epitope specific CSFE labeled target cells (Durward M et al., J Vis Exp 45 pii 2250 (2010)).

[0572] In vivo responses to MHC class I presentation can be followed by administering a MHC class I/antigen promoting agent (e.g., a peptide, protein or inactivated/attenuated virus vaccine) followed by challenge with an active agent (e.g. a virus) and monitoring responses to that agent, typically in comparison with unvaccinated controls. Ex vivo samples can be monitored for CTL activity with methods similar to those described previously (e.g. CTL cytotoxicity assays and quantification of cytokine release).

[0573] HLA-A, HLA-B, and/or HLA-C molecules are isolated from the intoxicated cells after lysis using immune affinity (e.g., an anti-MHC antibody “pulldown” purification) and the associated peptides (i.e., the peptides presented by the isolated MHC molecules) are recovered from the purified complexes. The recovered peptides are analyzed by sequencing mass spectrometry. The mass spectrometry data is compared against a protein database library consisting of the sequence of the exogenous (non-self) peptide (T-cell epitope X) and the international protein index for humans (representing “self” or non-immunogenic peptides). The peptides are ranked by significance according to a probability database. All detected antigenic (non-self) peptide sequences are listed. The data is verified by searching against a scrambled decoy database to reduce false hits (see e.g. Ma B, Johnson R, Mol Cell Proteomics 11: 0111.014902 (2012)). The results will demonstrate that peptides from the T-cell epitope X are presented in MHC complexes on the surface of intoxicated target cells.

[0574] The set of presented peptide-antigen-MHC complexes can vary between cells due to the antigen-specific HLA molecules expressed. T-cells can then recognize specific peptide-antigen-MHC complexes displayed on a cell surface using different TCR molecules with different antigen-specificities.

[0575] Because multiple T-cell epitopes may be delivered by a PD-L1 targeting molecule, such as, e.g., by embedding two or more different T-cell epitopes in a single proteasome delivering effector polypeptide, a single PD-L1 targeting molecule may be effective chordates of the same species with different MHC class variants, such as, e.g., in humans with different HLA alleles. This may allow for the combining within a single molecule of different T-cell epitopes with different effectiveness in different sub-populations of subjects based on MHC complex protein diversity and polymorphisms. For example, human MHC complex proteins, HLA proteins, vary among humans based on genetic ancestry, e.g. African (sub-Saharan), Amerindian, Caucasiod, Mongoloid, New Guinean and Australian, or Pacific islander.

[0576] The applications involving the T-cell epitope delivering polypeptides and molecules described herein are vast. Every nucleated cell in a mammalian organism may be capable of WIC class I pathway presentation of immunogenic, T-cell epitope-peptides on their cell outer surfaces complexed to WIC class I molecules. In addition, the sensitivity of T-cell epitope recognition is so exquisite that only a few MHC-I peptide complexes are required to be presented to result in an immune response, e.g., even presentation of a single complex can be sufficient for recognition by an effector T-cell (Sykulev Y et al., Immunity 4: 565-71 (1996)).

[0577] The activation of T-cell responses are desired characteristics of certain anti-cancer, anti-neoplastic, anti-tumor, and/or anti-microbial biologic drugs to stimulate the patient's own immune system toward targeted cells. Activation of a robust and strong T-cell response is also a desired characteristic of many vaccines. The presentation of a T-cell epitope by a target cell within an organism can lead to the activation of robust immune responses to a target cell and/or its general locale within an organism. Thus, the targeted delivery of a T-cell epitope for presentation may be utilized for as a mechanism for activating T-cell responses during a therapeutic regime.

[0578] The presentation of a T-cell immunogenic epitope-peptide by the WIC class I system targets the presenting cell for killing by CTL-mediated lysis and also triggers immune stimulation in the local microenvironment. By engineering immunogenic epitope sequences within Shiga toxin effector polypeptide components of target-cell-internalizing therapeutic molecules, the targeted delivery and presentation of immuno-stimulatory antigens may be accomplished. The presentation of immuno-stimulatory non-self antigens, such as e.g. known viral antigens with high immunogenicity, by target cells signals to other immune cells to destroy the target cells as well as to recruit more immune cells to the area.

[0579] The presentation of an immunogenic, T-cell epitope-peptide by the MHC class I complex targets the presenting cell for killing by CTL-mediated cytolysis. The presentation by targeted cells of immuno-stimulatory non-self antigens, such as, e.g., known viral epitope-peptides with high immunogenicity, can signal to other immune cells to destroy the target cells and recruit more immune cells to the target cell site within a chordate.

[0580] Thus, already cytotoxic molecules, such as e.g. therapeutic or potentially therapeutic molecules comprising Shiga toxin effector polypeptides, may be engineered using methods into more cytotoxic molecules and/or to have an additional cytotoxic mechanism operating via delivery of a T-cell epitope, presentation, and stimulation of effector T-cells. These multiple cytotoxic mechanisms may complement each other (such as by providing both direct target-cell-killing and indirect (CTL-mediated) cell-killing, redundantly backup each other (such as by providing one mechanism of cell-killing in the absence of the other), and/or protect against the development of therapeutic resistance (by limiting resistance to the less probable situation of the malignant or infected cell evolving to block two different cell-killing mechanisms simultaneously).

[0581] In addition, a cytotoxic molecule comprising a Shiga toxin effector polypeptide region that exhibits catalytic-based cytotoxicity may be engineered by the skilled worker using routine methods into enzymatically inactive variants. For example, the cytotoxic Shiga toxin effector polypeptide component of a cytotoxic molecule may be conferred with reduced activity and/or rendered inactive by the introduction of one or mutations and/or truncations such that the resulting molecule can still be cytotoxic via its ability to deliver a T-cell epitope to the MHC class I system of a target cell and subsequent presentation to the surface of the target cell. In another example, a T-cell epitope may be inserted or embedded into a Shiga toxin effector polypeptide such that the Shiga toxin effector polypeptide is inactivated by the added epitope (see e.g. WO 2015/113005: Example 1-F). This approach removes one cytotoxic mechanism while retaining or adding another and may also provide a molecule capable of exhibiting immuno-stimulation to the local area of a target cell(s) within an organism via delivered T-cell epitope presentation or “antigen seeding.” Furthermore, non-cytotoxic variants of the PD-L1 targeting molecules which comprise embedded or inserted, heterologous, T-cell epitopes may be useful in applications involving immune-stimulation within a chordate and/or labeling of target cells within a chordate with MEW class I molecule displayed epitopes.

[0582] The ability to deliver a T-cell epitope of certain Shiga toxin effector polypeptides and PD-L1 targeting molecules may be accomplished under varied conditions and in the presence of non-targeted bystander cells, such as, e.g., an ex vivo manipulated target cell, a target cell cultured in vitro, a target cell within a tissue sample cultured in vitro, or a target cell in an in vivo setting like within a multicellular organism.

C. Cell-Kill Via Targeted Cytotoxicity and/or Engagement of Cytotoxic T-Cells

[0583] For some embodiments, the PD-L1 targeting molecule can provide 1) delivery of a T-cell epitope for MEW class I presentation by a target cell and/or 2) potent cytotoxicity. For some embodiments of the PD-L1 targeting molecules, upon contacting a cell physically coupled with an extracellular PD-L1 bound by the cell-targeting binding region, the PD-L1 targeting molecule is capable of causing death of the cell. The mechanism of cell-kill may be direct, e.g. via the enzymatic activity of a toxin effector polypeptide region, or indirect via CTL-mediated cytolysis.

### 1. Indirect Cell-Kill Via T-Cell Epitope Delivery and MEW Class I Presentation

[0584] Some embodiments of the PD-L1 targeting molecules are cytotoxic because they comprise a CD8+ T-cell epitope capable of being delivered to the MEW class I presentation pathway of a target cell and presented on a cellular surface of the target cell. For example, T-cell epitope delivering, CD8+ T-cell hyper-immunized, Shiga toxin effector polypeptides, with or without endogenous epitope de-immunization, may be used as components of PD-L1 targeting molecules for applications involving indirect cell-killing.

[0585] In some embodiments of the PD-L1 targeting molecules, upon contacting a cell physically coupled with extracellular PD-L1 bound by the cell-targeting binding region, the PD-L1 targeting molecule is capable of indirectly causing the death of the cell, such as, e.g., via the presentation of one or more T-cell epitopes by the target cell and the subsequent recruitment of CTLs which kill the target cell.

[0586] The presentation of an antigenic peptide complexed with a MHC class I molecule by a cell sensitizes the presenting cell to targeted killing by cytotoxic T-cells (CTLs) via the induction of apoptosis, lysis, and/or necrosis. In addition, the CTLs which recognize the target cell may release immuno-stimulatory cytokines, such as, e.g., interferon gamma (IFN-gamma), tumor necrosis factor alpha (TNF), macrophage inflammatory protein-1 beta (MIP-1beta), and interleukins such as IL-17, IL-4, and IL-22. Furthermore, CTLs activated by recognition of a presented epitope may indiscriminately kill other cells proximal to the presenting cell regardless of the peptide-MHC class I complex repertoire presented by those proximal cells (Wiedemann A et al., Proc Natl Acad Sci USA 103: 10985-90 (2006)).

[0587] Because of MHC allele diversity within different species, a PD-L1 targeting molecule comprising only a single epitope may exhibit varied effectiveness to different patients or subjects of the same species. However, some embodiments of the PD-L1 targeting molecules may each comprise multiple, T-cell epitopes that are capable of being delivered to the MHC class I system of a target cell simultaneously. Thus, for some embodiments of the PD-L1 targeting molecules, a PD-L1 targeting molecule is used to treat different subjects with considerable differences in their MHC molecules' epitope-peptide binding affinities (i.e. considerable differences in their MHC alleles and/or WIC genotypes). In addition, some embodiments of the PD-L1 targeting molecules reduce or prevent target cell adaptations to escape killing (e.g. a target cancer cell mutating to escape therapeutic effectiveness or “mutant escape”) by using multiple cell-killing mechanisms simultaneously (e.g. direct killing and indirect killing via multiple different T-cell epitopes simultaneously). Some embodiments of the PD-L1 targeting molecules may deliver an antigen to the WIC class I presentation pathway of a target cell and the antigen is presented on a cellular surface of the target cell resulting in the in vivo stimulation of the immune system, such as the promotion of the polyclonal expansion of a T-cell population(s) in the periphery.

[0588] Some embodiments of the PD-L1 targeting molecules may deliver an antigen to the WIC class I presentation pathway of a target cell and which is presented on a cellular surface of the target cell resulting in the in vivo recruitment of endogenous polyfunctional memory CTL responses against target cells, e.g. tumor cells. This may also result in a redirection of an endogenous CTL response (e.g. an anti-viral response) against target tumor cells.

### 2. Direct Cell-Kill Via Cell-Targeted, Shiga Toxin Cytotoxicity

[0589] Some embodiments of the PD-L1 targeting molecules are cytotoxic because they comprise a catalytically active, Shiga toxin effector polypeptide and regardless of the presence of an immunogenic, CD8+ T-cell epitope in the molecule. For example, CD8+ T-cell hyper-immunized, Shiga toxin effector polypeptides, with or without endogenous epitope de-immunization, may be used as components of PD-L1 targeting molecules for applications involving direct cell-killing, such as, e.g., via the ribotoxic, enzymatic activity of a Shiga toxin effector polypeptide or ribosome binding and interference with ribosome function due to a non-catalytic mechanism(s).

[0590] In some embodiments of the CD8+ T-cell hyper-immunized, PD-L1 targeting molecules, upon contacting a cell physically coupled with extracellular PD-L1 bound by the cell-targeting binding region, the PD-L1 targeting molecule is capable of directly causing the death of the cell, such as, e.g., without the involvement of a untargeted, cytotoxic T-cell (see Section V-D, supra). This mechanism of action is independent of a subject's immune function status.

[0591] Some embodiments of the PD-L1 targeting molecules are cytotoxic to tumor cells in vivo in the absence of tumor infiltrating lymphocytes and regardless of the immune modulatory status of the tumor microenvironment, e.g. regardless if the tumor is characterized as “hot” or “cold”, non-inflamed, or immune-excluded. Tumors are described as “hot” if they show signs of inflammation, meaning that the tumor has already be infiltrated by T-cells rushing to fight the cancer cells. In some “hot” tumors, the tumor cells may have undergone many mutations that create neoantigens recognized by the T-cells. In contrast, nonimmunogenic “cold” tumors have not yet been infiltrated with T cells. The lack of T cells may make it difficult to provoke an immune response with standard immunotherapy treatments.

[0592] For example, certain cytotoxic PD-L1 targeting molecules comprising cytotoxic Shiga toxin effector polypeptides are effective at in vivo target cell killing independent of a subject's immune function status because these molecules function via the mechanism of action involving the inhibition of protein synthesis, which is not significantly affected by the tumor microenvironment. As another example, certain cytotoxic PD-L1 targeting molecules comprising a CD8+ T-cell epitope but not a catalytically active Shiga toxin effector polypeptide are cytotoxic to tumor cells in vivo in the absence of tumor infiltrating lymphocytes and regardless of the immune modulatory status of the tumor microenvironment, e.g. regardless if the tumor is characterized as “hot” or “cold”, non-inflamed, or immune-excluded. These cytotoxic molecules target the tumor directly, which is agnostric of the “hot” or “cold” status of the tumor. This activity is not reliant on enzymatic ribosome inhibition, so either active or inactive Shiga toxin variants can have this activity.

### 3. Alteration of Tumor Immunophenotpye

[0593] A PD-L1 targeting molecule treatment(s) may induce anti-tumor effects, such as, e.g., by directly killing PD-L1 expressing tumor cells and PD-L1 positive immune cells resulting in alterations of tumor immunophenotypes. For example, certain PD-L1 targeting molecules can deliver a viral antigen cargo for presentation in complex with MHC class I molecules on the surfaces of HLA*A02+/PD-L1+ target cells, which may lead to alterations in the immunophenotype of the tissue site, tumor, and/or tumor microenvironment thereby allowing for beneficial anti-tumor surveillance by effector T-cells.

[0594] Briefly, the mechanism of action involves targeting potent cytotoxicity to PD-L1 expressing target cells. Once the PD-L1 targeting molecule is in the endoplasmic reticulum or cytosol, the antigenic peptide cargo may be cleaved away from the rest of the PD-L1 targeting molecule allowing for transport of the antigenic peptide to the lumen of the endoplasmic reticulum and/or binding of the antigenic peptide by a MHC class I molecule. This allows for an unloaded MHC class I molecule to become loaded with the antigenic peptide cargo, for example, to form a “pp65 loaded MHC-I”. The antigen loaded MHC class I molecule can then be transported from the endoplasmic reticulum through the Golgi to the cell surface to present the epitope for recognition by the adaptive immune system. Once on the cell-surface, the antigen-loaded MHC class I molecule complex may be recognized by T-cells, e.g., leading to cytotoxic T-cell engagement and killing of the antigen-presenting target cell. The presentation of delivered antigens by tumor cells may result in an “altered immune phenotype” and result in antigen seeding as described herein. The re-direction of endogenous cytotoxic T-cells to the tumor target cells via delivery and presentation of an antigen may represent an altered immune phenotype for the tumor or specific locus within the treated subject.

[0595] The alteration of the immune phenotype may result in a redirection of an endogenous CTL response (e.g. an anti-viral response) against target tumor cells. For example, the deliver and presentation of a class I CMV antigenic peptide may re-direct endogenous CMV-specific cytotoxic T-cells (CTLs) to the tumor cells. There may exist an endogenous population of CTLs which are CMV antigen specific that are present in the subject in a pool available for tissue homing to a tumor cell site. Once a CMV antigen is delivered and display by the MEW system, then these CTLs may move into the PD-L1 targeting molecule's targeted tissue and infiltrate tumor(s). Thus, a hot tumor environment with suppressed immune cell function (e.g. anergic) may have new CTLs arrive which initially would not be suppressed. Similarly, a cold or tumor-excluded microenvironment may also have new CTLs arrive which initially would not be suppressed and capable of clearing CMV antigen displaying cells.

[0596] In addition, the alteration of the immune phenotype may result in the activation or hyperactivation of naïve T-cells undergoing antigen presentation, such as with a tumor cell or at a tumor site, the in vivo stimulation of the immune system, such as the promotion of the polyclonal expansion of a T-cell population(s) in the periphery, and the in vivo recruitment of endogenous polyfunctional memory CTL responses against target cells, e.g. tumor cells. This may also result in a redirection of an endogenous CTL response against target tumor cells. In addition, this may result in the restoration of healthy memory T-cell function specific to the target tumor cell, such as via stimulation of the immune system tipping the balance to active immunosurveillance or relieving immunosuppresion. The stimulation of the immune system could be due to several factors, not limited to but including, responses to antigenicity of the PD-L1 targeting molecule, responses to the delivered and displayed antigen cargo, and cross-presentation of viral and cancer antigens during the CTL mediated killing of target cells initiated by the PD-L1 targeting molecule coming in contact with a target cell in vivo.

[0597] The alteration of the immune phenotype may occur in subjects having a specific HLA allele(s) regardless of whether the subject or the target cell is homozygous or heterozygous for that particular allele(s).

### C. Selective Cytotoxicity Among Cell Types

[0598] Certain PD-L1 targeting molecules have uses in the selective killing of specific target cells in the presence of untargeted, bystander cells. By targeting the delivery of Shiga toxin effector polypeptides to specific cells via a cell-targeting binding region(s), the PD-L1 targeting molecules can exhibit cell-type specific, restricted cell-kill activities resulting in the exclusive or preferential killing selected cell types in the presence of untargeted cells. Similarly, by targeting the delivery of immunogenic T-cell epitopes to the MEW class I pathway of target cells, the subsequent presentation of T-cell epitopes and CTL-mediated cytolysis of target cells induced by the PD-L1 targeting molecules can be restricted to exclusively or preferentially killing selected cell types in the presence of untargeted cells. In addition, both the cell-targeted delivery of a cytotoxic, Shiga toxin effector polypeptide region and an immunogenic, T-cell epitope can be accomplished by a single PD-L1 targeting molecule such that deliver of both potentially cytotoxic components is restricted exclusively or preferentially to target cells in the presence of untargeted cells.

[0599] For some embodiments, the PD-L1 targeting molecule is cytotoxic at certain concentrations. In some embodiments, upon administration of the PD-L1 targeting molecule to a mixture of cell types, the cytotoxic PD-L1 targeting molecule is capable of selectively killing those cells which are physically coupled with extracellular PD-L1 bound by the binding region compared to cell types not physically coupled with any extracellular PD-L1. In some embodiments, the cytotoxic PD-L1 targeting molecule is capable of selectively or preferentially causing the death of a specific cell type within a mixture of two or more different cell types. This enables targeting cytotoxic activity to specific cell types with a high preferentiality, such as a 3-fold cytotoxic effect, over “bystander” cell types that do not express the target biomolecule. Alternatively, the expression of the target biomolecule of the binding region may be non-exclusive to one cell type if the target biomolecule is expressed in low enough amounts and/or physically coupled in low amounts with cell types that are not to be targeted. This enables the targeted cell-killing of specific cell types with a high preferentiality, such as a 3-fold cytotoxic effect, over “bystander” cell types that do not express significant amounts of the target biomolecule or are not physically coupled to significant amounts of the target biomolecule.

[0600] For some embodiments, upon administration of the cytotoxic PD-L1 targeting molecule to two different populations of cell types, the cytotoxic PD-L1 targeting molecule is capable of causing cell death as defined by the half-maximal cytotoxic concentration (CD₅₀) on a population of target cells, whose members express an extracellular target biomolecule of the binding region of the cytotoxic PD-L1 targeting molecule, at a dose at least three-times lower than the CD₅₀ dose of the same cytotoxic PD-L1 targeting molecule to a population of cells whose members do not express an extracellular target biomolecule of the binding region of the cytotoxic PD-L1 targeting molecule.

[0601] In some embodiments, the cytotoxic activity of a PD-L1 targeting molecule toward populations of cell types physically coupled with an extracellular PD-L1 bound by the binding region is at least 3-fold higher than the cytotoxic activity toward populations of cell types not physically coupled with any extracellular PD-L1 bound by the binding region. In some embodiments, selective cytotoxicity may be quantified in terms of the ratio (a/b) of (a) cytotoxicity towards a population of cells of a specific cell type physically coupled with extracellular PD-L1 bound by the binding region to (b) cytotoxicity towards a population of cells of a cell type not physically coupled with any extracellular PD-L1 bound by binding region. In some embodiments, the cytotoxicity ratio is indicative of selective cytotoxicity which is at least 3-fold, 5-fold, 10-fold, 15-fold, 20-fold, 25-fold, 30-fold, 40-fold, 50-fold, 75-fold, 100-fold, 250-fold, 500-fold, 750-fold, or 1000-fold higher for populations of cells or cell types physically coupled with a target biomolecule of the binding region compared to populations of cells or cell types not physically coupled with a target biomolecule of the binding region.

[0602] For some embodiments, the preferential cell-killing function or selective cytotoxicity of a PD-L1 targeting molecule is due to an additional exogenous material (e.g. a cytotoxic material) and/or heterologous, T-cell epitope present in a Shiga toxin effector polypeptide and not necessarily a result of the catalytic activity of a Shiga toxin effector polypeptide region.

[0603] This preferential cell-killing function allows a targeted cell to be killed by certain cytotoxic, PD-L1 targeting molecules under varied conditions and in the presence of non-targeted bystander cells, such as ex vivo manipulated mixtures of cell types, in vitro cultured tissues with mixtures of cell types, or in vivo in the presence of multiple cell types (e.g. in situ or in a native location within a multicellular organism).

### D. PD-L1 Modulation Reducing Immunosuppression

[0604] In some embodiments, the PD-L1 targeting molecules modulate expression of the PD-L1 target to which the PD-L1 targeting molecules' binding region binds. In some embodiments, the PD-L1 targeting molecules reduce or downregulate expression of the PD-L1 target. In some embodiments, the PD-L1 targeting molecules reduce cell-surface density of the PD-L1 target. In some embodiments in which PD-L1 functions as an immunosuppressive signal, modulation of expression of the PD-L1 target reduces immunosuppression. In some embodiments in which PD-L1 is involved in, e.g., promotes, cell-survival, modulation of expression of the PD-L1 target promotes cell death or weakens the promotion of cell-survival.

[0605] Certain PD-L1 targeting molecules are designed to deplete in vivo both PD-L1 expressing tumor cells and PD-L1 expressing immune cells. The targeted killing of PD-L1 immune cells can reduce the inhibition, both systemically and locally, of immune cells that might participate in immunosurveillance of tumor cells. For example, the inhibitory immune state of the tumor microenvironment may be relieved by the actions of a PD-L1 targeting molecule, such as via direct cell kill or PD-L1 modulation. This may lead to the release of effector T cell repression toward target tumor cells. At certain concentrations, the PD-L1 targeting molecule may preferentially deplete those PD-L1 immune cells which express only very high levels of PD-L1 or that are present within a tumor. Further, the MHC display of a viral antigen by PD-L1 expressing immune cells may target them for cytolysis by CTLs.

E. Delivery of Additional Exogenous Material into the Interior of Targeted Cells

[0606] In addition to cytotoxic, cytostatic, and immune stimulation applications, PD-L1 targeting molecules optionally may be used for targeted intracellular delivery functions, such as, e.g., in applications involving information gathering and diagnostic functions.

[0607] Because the PD-L1 targeting molecules (including reduced cytotoxicity and/or nontoxic forms thereof) are capable of entering cells physically coupled with an extracellular PD-L1 molecule recognized by the PD-L1 targeting molecule's binding region, some embodiments of the PD-L1 targeting molecules may be used to deliver additional exogenous materials into the interior of targeted cell types. For example, non-toxic variants of the cytotoxic, PD-L1 targeting molecules, or optionally cytotoxic variants, may be used to deliver additional exogenous materials to and/or label the interiors of cells physically coupled with an extracellular PD-L1 bound by the binding region of the PD-L1 targeting molecule. Various types of cells and/or cell populations which express target biomolecules to at least one cellular surface may be targeted by the PD-L1 targeting molecules for receiving exogenous materials. The functional components are modular, in that various Shiga toxin effector polypeptides, additional exogenous materials, and binding regions may be associated with each other to provide PD-L1 targeting molecules suitable for diverse applications involving cargo delivery, such as, e.g., non-invasive, in vivo imaging of tumor cells.

[0608] This delivery of exogenous material function of certain PD-L1 targeting molecules may be accomplished under varied conditions and in the presence of non-targeted bystander cells, such as, e.g., an ex vivo manipulated target cell, a target cell cultured in vitro, a target cell within a tissue sample cultured in vitro, or a target cell in an in vivo setting like within a multicellular organism. Furthermore, the selective delivery of exogenous material to certain cells by certain PD-L1 targeting molecules may be accomplished under varied conditions and in the presence of non-targeted bystander cells, such as ex vivo manipulated mixtures of cell types, in vitro cultured tissues with mixtures of cell types, or in vivo in the presence of multiple cell types (e.g., in situ or in a native location within a multicellular organism).

[0609] Shiga toxin effector polypeptides and PD-L1 targeting molecules which are not capable, such as a certain concentration ranges, of killing a target cell and/or delivering an embedded or inserted epitope for cell-surface presentation by a MHC molecule of a target cell may still be useful for delivering exogenous materials into cells, such as, e.g., detection promoting agents.

[0610] For some embodiments, the Shiga toxin effector exhibits low to zero cytotoxicity and thus are referred to herein as “noncytotoxic and/or reduced cytotoxic.” For some embodiments, the PD-L1 targeting molecule exhibits low to zero cytotoxicity and may be referred to as “noncytotoxic” and/or “reduced cytotoxic variants.” For example, some embodiments of the molecules do not exhibit a significant level of Shiga toxin based cytotoxicity wherein at doses of less than 1000 nM, 500 nM, 100 nM, 75 nM, 50 nM, there is no significant amount of cell death as compared to the appropriate reference molecule, such as, e.g., as measured by an assay known to the skilled worker and/or described herein. For some embodiments, the molecules do not exhibit any toxicity at dosages of 1-100 μg per kg of a mammalian recipient. Reduced-cytotoxic variants may still be cytotoxic at certain concentrations or dosages but exhibit reduced cytotoxicity, such as, e.g., are not capable of exhibiting a significant level of Shiga toxin cytotoxicity in certain situations.

[0611] Certain PD-L1 targeting molecules comprising the same, can be rendered non-cytotoxic, such as, e.g., via the addition of one or more amino acid substitutions known to the skilled worker to inactivate a Shiga toxin A Subunit and/or Shiga toxin effector polypeptide, including illustrative substitutions described herein. The non-cytotoxic and reduced cytotoxic variants of the PD-L1 targeting molecules may be in certain situations more suitable for delivery of additional exogenous materials than more cytotoxic variants.

### Information Gathering for Diagnostic Functions

[0612] Some of the PD-L1 targeting molecules described herein have uses in the in vitro and/or in vivo detection of specific cells, cell types, and/or cell populations, as well as specific subcellular compartments of any of the aforementioned. Reduced-cytotoxicity and/or nontoxic forms of the cytotoxic, PD-L1 targeting molecules that are conjugated to detection promoting agents optionally may be used for diagnostic functions, such as for companion diagnostics used in conjunction with a therapeutic regimen comprising the same or a related binding region, such as, e.g., a binding region with high-affinity binding to the same target biomolecule, an overlapping epitope, and/or the same epitope.

[0613] In some embodiments, the PD-L1 targeting molecules described herein are used for both diagnosis and treatment, or for diagnosis alone. When the same cytotoxic PD-L1 targeting molecule is used for both diagnosis and treatment, the PD-L1 targeting molecule variant which incorporates a detection promoting agent for diagnosis may have its cytotoxicity reduced or may be rendered nontoxic by catalytic inactivation of its Shiga toxin effector polypeptide region(s) via one or more amino acid substitutions, including illustrative substitutions described herein. For example, certain nontoxic variants of the PD-L1 targeting molecules exhibit less than 5%, 4%, 3%, 2%, or 1% death of target cells after administration of a dose less than 1 mg/kg. Reduced-cytotoxicity variants may still be cytotoxic at certain concentrations or dosages but exhibit reduced cytotoxicity, such as, e.g., are not capable of exhibiting a significant level of Shiga toxin cytotoxicity as described herein.

[0614] The ability to conjugate detection promoting agents known in the art to various PD-L1 targeting molecules provides useful compositions for the detection of certain cells, such as, e.g., cancer, tumor, immune, and/or infected cells. These diagnostic embodiments of the PD-L1 targeting molecules may be used for information gathering via various imaging techniques and assays known in the art. For example, diagnostic embodiments of the PD-L1 targeting molecules may be used for information gathering via imaging of intracellular organelles (e.g. endocytotic, Golgi, endoplasmic reticulum, and cytosolic compartments) of individual cancer cells, immune cells, and/or infected cells in a patient or biopsy sample.

[0615] Various types of information may be gathered using the diagnostic embodiments of the PD-L1 targeting molecules whether for diagnostic uses or other uses. This information may be useful, for example, in diagnosing neoplastic cell types, determining therapeutic susceptibilities of a patient's disease, assaying the progression of anti-neoplastic therapies over time, assaying the progression of immunomodulatory therapies over time, assaying the progression of antimicrobial therapies over time, evaluating the presence of infected cells in transplantation materials, evaluating the presence of unwanted cell types in transplantation materials, and/or evaluating the presence of residual tumor cells after surgical excision of a tumor mass.

[0616] For example, subpopulations of patients might be ascertained using information gathered using the diagnostic variants of the PD-L1 targeting molecules, and then individual patients could be further categorized into subpopulations based on their unique characteristic(s) revealed using those diagnostic embodiments. For example, the effectiveness of specific pharmaceuticals or therapies might be a criterion used to define a patient subpopulation. For example, a nontoxic diagnostic variant of a particular, cytotoxic PD-L1 targeting molecule may be used to differentiate which patients are in a class or subpopulation of patients predicted to respond positively to a cytotoxic variant of that PD-L1 targeting molecule. Accordingly, associated methods for patient identification, patient stratification, and diagnosis using PD-L1 targeting molecules, including non-toxic variants of cytotoxic, PD-L1 targeting molecules, are contemplated herein.

[0617] The expression of the target biomolecule by a cell need not be native in order for cell-targeting by a PD-L1 targeting molecule, such as, e.g., for direct cell-kill, indirect cell-kill, delivery of exogenous materials like T-cell epitopes, and/or information gathering. Cell surface expression of the target biomolecule could be the result of an infection, the presence of a pathogen, and/or the presence of an intracellular microbial pathogen. Expression of a target biomolecule could be artificial such as, for example, by forced or induced expression after infection with a viral expression vector, see e.g. adenoviral, adeno-associated viral, and retroviral systems. Expression of PD-L1 can be induced by exposing a cell to ionizing radiation (Wattenberg M et al., Br J Cancer 110: 1472-80 (2014)).

### V. Production, Manufacture, and Purification of Shiga Toxin Effector Polypeptides and PD-L1 Targeting Molecules

[0618] The Shiga toxin effector polypeptides and certain PD-L1 targeting molecules may be produced using techniques well known to those of skill in the art. For example, Shiga toxin effector polypeptides and PD-L1 targeting molecules may be manufactured by standard synthetic methods, by use of recombinant expression systems, or by any other suitable method. Thus, Shiga toxin effector polypeptides and PD-L1 targeting molecules may be synthesized in a number of ways, including, e.g. methods comprising: (1) synthesizing a polypeptide or polypeptide component of a PD-L1 targeting molecule using standard solid-phase or liquid-phase methodology, either stepwise or by fragment assembly, and isolating and purifying the final polypeptide compound product; (2) expressing a polynucleotide that encodes a protein or protein component of a PD-L1 targeting molecule in a host cell and recovering the expression product from the host cell or host cell culture; or (3) cell-free, in vitro expression of a polynucleotide encoding a polypeptide or polypeptide component of a PD-L1 targeting molecule, and recovering the expression product; or by any combination of the methods of (1), (2) or (3) to obtain fragments of the protein component, subsequently joining (e.g. ligating) the peptide or polypeptide fragments to obtain a polypeptide component, and recovering the polypeptide component.

[0619] It may be preferable to synthesize a PD-L1 targeting molecule, or a protein component of a PD-L1 targeting molecule, by means of solid-phase or liquid-phase peptide synthesis. Polypeptides and PD-L1 targeting molecules may suitably be manufactured by standard synthetic methods. Thus, peptides may be synthesized by, e.g. methods comprising synthesizing the peptide by standard solid-phase or liquid-phase methodology, either stepwise or by fragment assembly, and isolating and purifying the final peptide product. In this context, reference may be made to WO 1998/011125 or, inter alia, Fields G et al., Principles and Practice of Solid-Phase Peptide Synthesis (Synthetic Peptides, Grant G, ed., Oxford University Press, U.K., 2nd ed., 2002) and the synthesis examples therein.

[0620] Shiga toxin effector polypeptides and PD-L1 targeting molecules may be prepared (produced and purified) using recombinant techniques well known in the art. In general, methods for preparing proteins by culturing host cells transformed or transfected with a vector comprising the encoding polynucleotide and purifying or recovering the protein from cell culture are described in, e.g., Sambrook J et al., Molecular Cloning: A Laboratory Manual (Cold Spring Harbor Laboratory Press, NY, U.S., 1989); Dieffenbach C et al., PCR Primer: A Laboratory Manual (Cold Spring Harbor Laboratory Press, N.Y., U.S., 1995). Any suitable host cell may be used to produce a polypeptide and/or cell-targeting protein. Host cells may be cells stably or transiently transfected, transformed, transduced or infected with one or more expression vectors which drive expression of a polypeptide. In addition, a Shiga toxin effector polypeptide and/or PD-L1 targeting molecule may be produced by modifying the polynucleotide encoding a polypeptide or cell-targeting protein that result in altering one or more amino acids or deleting or inserting one or more amino acids in order to achieve desired properties, such as changed cytotoxicity, changed cytostatic effects, and/or changed serum half-life.

[0621] There are a wide variety of expression systems which may be chosen to produce a polypeptide or cell-targeting protein. For example, host organisms for expression of cell-targeting proteins include prokaryotes, such as E. coli and B. subtilis, eukaryotic cells, such as yeast and filamentous fungi (like S. cerevisiae, P. pastoris, A. awamori, and K. lactis), algae (like C. reinhardtii), insect cell lines, mammalian cells (like CHO cells), plant cell lines, and eukaryotic organisms such as transgenic plants (like A. thaliana and N. benthamiana).

[0622] Accordingly, in some embodiments, the instant disclosure provides methods for producing a Shiga toxin effector polypeptide and/or PD-L1 targeting molecule according to above recited methods and using a polynucleotide encoding part or all of a polypeptide or a protein component of a cell-targeting protein, an expression vector comprising at least one polynucleotide capable of encoding part or all of a polypeptide or cell-targeting protein when introduced into a host cell, and/or a host cell comprising a polynucleotide or expression vector.

[0623] When a protein is expressed using recombinant techniques in a host cell or cell-free system, it is advantageous to separate (or purify) the desired protein away from other components, such as host cell factors, in order to obtain preparations that are of high purity or are substantially homogeneous. Purification can be accomplished by methods well known in the art, such as centrifugation techniques, extraction techniques, chromatographic and fractionation techniques (e.g. size separation by gel filtration, charge separation by ion-exchange column, hydrophobic interaction chromatography, reverse phase chromatography, chromatography on silica or cation-exchange resins such as DEAE and the like, chromatofocusing, and Protein A Sepharose chromatography to remove contaminants), and precipitation techniques (e.g. ethanol precipitation or ammonium sulfate precipitation). Any number of biochemical purification techniques may be used to increase the purity of a polypeptide and/or PD-L1 targeting molecule. In some embodiments, the polypeptides and PD-L1 targeting molecules may optionally be purified in homo-multimeric forms (e.g. a molecular complex comprising two or more polypeptides or PD-L1 targeting molecules).

[0624] In the Examples below are descriptions of non-limiting examples of methods for producing illustrative, Shiga toxin effector polypeptides and PD-L1 targeting molecules, as well as specific but non-limiting aspects of production methods.

### VI. Pharmaceutical and Diagnostic Compositions Comprising PD-L1 Targeting Molecules

[0625] Also provided herein are Shiga toxin effector polypeptides and PD-L1 targeting molecules for use, alone or in combination with one or more additional therapeutic agents, in a pharmaceutical composition, for treatment or prophylaxis of conditions, diseases, disorders, or symptoms described in further detail below (e.g. cancers, malignant tumors, non-malignant tumors, growth abnormalities, immune disorders, and microbial infections). Also provided herein are pharmaceutical compositions comprising a PD-L1 targeting molecule, or a pharmaceutically acceptable salt or solvate thereof, together with at least one pharmaceutically acceptable carrier, excipient, or vehicle. In some embodiments, the pharmaceutical composition may comprise homo-multimeric and/or hetero-multimeric forms of a PD-L1 targeting molecule. The pharmaceutical compositions are useful in methods of treating, ameliorating, or preventing a disease, condition, disorder, or symptom described in further detail below. Each such disease, condition, disorder, or symptom is envisioned to be a separate embodiment with respect to uses of a pharmaceutical composition described herein. Also provided herein are pharmaceutical compositions for use in at least one method of treatment, as described in more detail below.

[0626] As used herein, the terms “patient” and “subject” are used interchangeably to refer to any organism, commonly vertebrates such as humans and animals, which presents symptoms, signs, and/or indications of at least one disease, disorder, or condition. These terms include mammals such as the non-limiting examples of primates, livestock animals (e.g. cattle, horses, pigs, sheep, goats, etc.), companion animals (e.g. cats, dogs, etc.) and laboratory animals (e.g. mice, rabbits, rats, etc.).

[0627] As used herein, “treat,” “treating,” or “treatment” and grammatical variants thereof refer to an approach for obtaining beneficial or desired clinical results. The terms may refer to slowing the onset or rate of development of a condition, disorder or disease, reducing or alleviating symptoms associated with it, generating a complete or partial regression of the condition, or some combination of any of the above. For the purposes of the instant disclosure, beneficial or desired clinical results include, but are not limited to, reduction or alleviation of symptoms, diminishment of extent of disease, stabilization (e.g. not worsening) of state of disease, delay or slowing of disease progression, amelioration or palliation of the disease state, and remission (whether partial or total), whether detectable or undetectable. “Treat,” “treating,” or “treatment” can also mean prolonging survival relative to expected survival time if not receiving treatment. A subject (e.g. a human) in need of treatment may thus be a subject already afflicted with the disease or disorder in question. The terms “treat,” “treating,” or “treatment” includes inhibition or reduction of an increase in severity of a pathological state or symptoms relative to the absence of treatment, and is not necessarily meant to imply complete cessation of the relevant disease, disorder, or condition. With regard to tumors and/or cancers, treatment includes reduction in overall tumor burden and/or individual tumor size.

[0628] As used herein, the terms “prevent,” “preventing,” “prevention” and grammatical variants thereof refer to an approach for preventing the development of, or altering the pathology of, a condition, disease, or disorder. Accordingly, “prevention” may refer to prophylactic or preventive measures. For the purposes of the instant disclosure, beneficial or desired clinical results include, but are not limited to, prevention or slowing of symptoms, progression or development of a disease, whether detectable or undetectable. A subject (e.g. a human) in need of prevention may thus be a subject not yet afflicted with the disease or disorder in question. The term “prevention” includes slowing the onset of disease relative to the absence of treatment and is not necessarily meant to imply permanent prevention of the relevant disease, disorder or condition. Thus “preventing” or “prevention” of a condition may in certain contexts refer to reducing the risk of developing the condition, or preventing or delaying the development of symptoms associated with the condition.

[0629] As used herein, an “effective amount” or “therapeutically effective amount” is an amount or dose of a composition (e.g. a therapeutic composition, compound, or agent) that produces at least one desired therapeutic effect in a subject, such as preventing or treating a target condition or beneficially alleviating a symptom associated with the condition. The most desirable therapeutically effective amount is an amount that will produce a desired efficacy of a particular treatment selected by one of skill in the art for a given subject in need thereof. This amount will vary depending upon a variety of factors understood by the skilled worker, including but not limited to the characteristics of the therapeutic composition (including activity, pharmacokinetics, pharmacodynamics, and bioavailability), the physiological condition of the subject (including age, sex, disease type, disease stage, general physical condition, responsiveness to a given dosage, and type of medication), the nature of the pharmaceutically acceptable carrier or carriers in the formulation, and the route of administration. One skilled in the clinical and pharmacological arts will be able to determine a therapeutically effective amount through routine experimentation, namely by monitoring a subject's response to administration of a composition and adjusting the dosage accordingly (see e.g. Remington: The Science and Practice of Pharmacy (Gennaro A, ed., Mack Publishing Co., Easton, Pa., U.S., 19th ed., 1995)).

[0630] Diagnostic compositions comprise a PD-L1 targeting molecule and one or more detection promoting agents. When producing or manufacturing a diagnostic composition, a PD-L1 targeting molecule may be directly or indirectly linked to one or more detection promoting agents. There are numerous standard techniques known to the skilled worker for incorporating, affixing, and/or conjugating various detection promoting agents to proteins or proteinaceous components of molecules, especially to immunoglobulins and immunoglobulin-derived domains.

[0631] There are numerous detection promoting agents known to the skilled worker, such as isotopes, dyes, colorimetric agents, contrast enhancing agents, fluorescent agents, bioluminescent agents, and magnetic agents, which can be operably linked to the polypeptides or PD-L1 targeting molecules for information gathering methods, such as for diagnostic and/or prognostic applications to diseases, disorders, or conditions of an organism (see e.g. Cai W et al., J Nucl Med 48: 304-10 (2007); Nayak T, Brechbiel M, Bioconjug Chem 20: 825-41 (2009); Paudyal P et al., Oncol Rep 22: 115-9 (2009); Qiao J et al., PLoS ONE 6: e18103 (2011); Sano K et al., Breast Cancer Res 14: R61 (2012)). These agents may be associated with, linked to, and/or incorporated within the polypeptide or PD-L1 targeting molecule at any suitable position. For example, the linkage or incorporation of the detection promoting agent may be via an amino acid residue(s) of a molecule or via some type of linkage known in the art, including via linkers and/or chelators. The incorporation of the agent is in such a way to enable the detection of the presence of the diagnostic composition in a screen, assay, diagnostic procedure, and/or imaging technique.

[0632] Similarly, there are numerous imaging approaches known to the skilled worker, such as non-invasive in vivo imaging techniques commonly used in the medical arena, for example: computed tomography imaging (CT scanning), optical imaging (including direct, fluorescent, and bioluminescent imaging), magnetic resonance imaging (MM), positron emission tomography (PET), single-photon emission computed tomography (SPECT), ultrasound, and x-ray computed tomography imaging.

VII. Production or Manufacture of Pharmaceutical and/or Diagnostic Compositions Comprising PD-L1 Targeting Molecules

[0633] Pharmaceutically acceptable salts or solvates of any of the Shiga toxin effector polypeptides and PD-L1 targeting molecules are also described herein.

[0634] The term “solvate” refers to a complex of defined stoichiometry formed between a solute (in casu, a proteinaceous compound or pharmaceutically acceptable salt thereof) and a solvent. The solvent in this connection may, for example, be water, ethanol or another pharmaceutically acceptable, typically small-molecular organic species, such as, but not limited to, acetic acid or lactic acid. When the solvent in question is water, such a solvate is normally referred to as a hydrate.

[0635] Polypeptides and proteins, or salts thereof, may be formulated as pharmaceutical compositions prepared for storage or administration, which typically comprise a therapeutically effective amount of a molecule as described herein, or a salt thereof, in a pharmaceutically acceptable carrier. The term “pharmaceutically acceptable carrier” includes any of the standard pharmaceutical carriers. Pharmaceutically acceptable carriers for therapeutic molecule use are well known in the pharmaceutical art, and are described, for example, in Remington's Pharmaceutical Sciences (Mack Publishing Co. (A. Gennaro, ed., 1985). As used herein, “pharmaceutically acceptable carrier” includes any and all physiologically acceptable, i.e. compatible, solvents, dispersion media, coatings, antimicrobial agents, isotonic, and absorption delaying agents, and the like. Pharmaceutically acceptable carriers or diluents include those used in formulations suitable for oral, rectal, nasal or parenteral (including subcutaneous, intramuscular, intravenous, intradermal, and transdermal) administration. Illustrative pharmaceutically acceptable carriers include sterile aqueous solutions or dispersions and sterile powders for the extemporaneous preparation of sterile injectable solutions or dispersions. Examples of suitable aqueous and nonaqueous carriers that may be employed in the pharmaceutical compositions include water, ethanol, polyols (such as glycerol, propylene glycol, polyethylene glycol, and the like), and suitable mixtures thereof, vegetable oils, such as olive oil, and injectable organic esters, such as ethyloleate. Proper fluidity can be maintained, for example, by the use of coating materials, such as lecithin, by the maintenance of the required particle size in the case of dispersions, and by the use of surfactants. In some embodiments, the carrier is suitable for intravenous, intramuscular, subcutaneous, parenteral, spinal or epidermal administration (e.g. by injection or infusion). Depending on selected route of administration, the protein or other pharmaceutical component may be coated in a material intended to protect the compound from the action of low pH and other natural inactivating conditions to which the active protein may encounter when administered to a patient by a particular route of administration.

[0636] The formulations of the pharmaceutical compositions may conveniently be presented in unit dosage form and may be prepared by any of the methods well known in the art of pharmacy. In such form, the composition is divided into unit doses containing appropriate quantities of the active component. The unit dosage form can be a packaged preparation, the package containing discrete quantities of the preparations, for example, packeted tablets, capsules, and powders in vials or ampoules. The unit dosage form can also be a capsule, cachet, or tablet itself, or it can be the appropriate number of any of these packaged forms. It may be provided in single dose injectable form, for example in the form of a pen. Compositions may be formulated for any suitable route and means of administration. Subcutaneous or transdermal modes of administration may be particularly suitable for therapeutic proteins described herein.

[0637] The pharmaceutical compositions may also contain adjuvants such as preservatives, wetting agents, emulsifying agents and dispersing agents. Preventing the presence of microorganisms may be ensured both by sterilization procedures, and by the inclusion of various antibacterial and antifungal agents, for example, paraben, chlorobutanol, phenol sorbic acid, and the like. Isotonic agents, such as sugars, sodium chloride, and the like into the compositions, may also be desirable. In addition, prolonged absorption of the injectable pharmaceutical form may be brought about by the inclusion of agents which delay absorption such as, aluminum monostearate and gelatin.

[0638] A pharmaceutical composition also optionally includes a pharmaceutically acceptable antioxidant. Illustrative pharmaceutically acceptable antioxidants are water soluble antioxidants such as ascorbic acid, cysteine hydrochloride, sodium bisulfate, sodium metabisulfite, sodium sulfite and the like; oil-soluble antioxidants, such as ascorbyl palmitate, butylated hydroxyanisole (BHA), butylated hydroxytoluene (BHT), lecithin, propylgallate, alpha-tocopherol, and the like; and metal chelating agents, such as citric acid, ethylenediamine tetraacetic acid (EDTA), sorbitol, tartaric acid, phosphoric acid, and the like.

[0639] In some embodiments pharmaceutical compositions comprise one or a combination of different PD-L1 targeting molecules, or an ester, salt or amide of any of the foregoing, and at least one pharmaceutically acceptable carrier.

[0640] Therapeutic compositions are typically sterile and stable under the conditions of manufacture and storage. The composition may be formulated as a solution, microemulsion, liposome, or other ordered structure suitable to high drug concentration. The carrier may be a solvent or dispersion medium containing, for example, water, alcohol such as ethanol, polyol (e.g., glycerol, propylene glycol, and liquid polyethylene glycol), or any suitable mixtures. The proper fluidity may be maintained, for example, by the use of a coating such as lecithin, by the maintenance of the required particle size in the case of dispersion and by use of surfactants according to formulation chemistry well known in the art. In some embodiments, isotonic agents, e.g., sugars and polyalcohols such as mannitol, sorbitol, or sodium chloride, may be desirable in the composition. Prolonged absorption of injectable compositions may be brought about by including in the composition an agent that delays absorption for example, monostearate salts and gelatin.

[0641] Solutions or suspensions used for intradermal or subcutaneous application typically include one or more of: a sterile diluent such as water for injection, saline solution, fixed oils, polyethylene glycols, glycerine, propylene glycol or other synthetic solvents; antibacterial agents such as benzyl alcohol or methyl parabens; antioxidants such as ascorbic acid or sodium bisulfite; chelating agents such as ethylenediaminetetraacetic acid; buffers such as acetates, citrates or phosphates; and tonicity adjusting agents such as, e.g., sodium chloride or dextrose. The pH can be adjusted with acids or bases, such as hydrochloric acid or sodium hydroxide, or buffers with citrate, phosphate, acetate and the like. Such preparations may be enclosed in ampoules, disposable syringes or multiple dose vials made of glass or plastic.

[0642] Sterile injectable solutions may be prepared by incorporating a polypeptide or PD-L1 targeting molecule in the required amount in an appropriate solvent with one or a combination of ingredients described above, as required, followed by sterilization microfiltration. Dispersions may be prepared by incorporating the active compound into a sterile vehicle that contains adispersion medium and other ingredients, such as those described above. In the case of sterile powders for the preparation of sterile injectable solutions, the methods of preparation are vacuum drying and freeze-drying (lyophilization) that yield a powder of the active ingredient in addition to any additional desired ingredient from a sterile-filtered solution thereof.

[0643] When a therapeutically effective amount of a polypeptide and/or PD-L1 targeting molecule is designed to be administered by, e.g. intravenous, cutaneous or subcutaneous injection, the binding agent will be in the form of a pyrogen-free, parenterally acceptable aqueous solution. Methods for preparing parenterally acceptable protein solutions, taking into consideration appropriate pH, isotonicity, stability, and the like, are within the skill in the art. A preferred pharmaceutical composition for intravenous, cutaneous, or subcutaneous injection will contain, in addition to binding agents, an isotonic vehicle such as sodium chloride injection, Ringer's injection, dextrose injection, dextrose and sodium chloride injection, lactated Ringer's injection, or other vehicle as known in the art. A pharmaceutical composition may also contain stabilizers, preservatives, buffers, antioxidants, or other additives well known to those of skill in the art.

[0644] As described elsewhere herein, a polypeptide and/or PD-L1 targeting molecule may be prepared with carriers that will protect the active therapeutic agent against rapid release, such as a controlled release formulation, including implants, transdermal patches, and microencapsulated delivery systems. Biodegradable, biocompatible polymers can be used, such as ethylene vinyl acetate, polyanhydrides, polyglycolic acid, collagen, polyorthoesters, and polylactic acid. Many methods for the preparation of such formulations are patented or generally known to those skilled in the art (see e.g. Sustained and Controlled Release Drug Delivery Systems (Robinson J, ed., Marcel Dekker, Inc., NY, U.S., 1978)).

[0645] In some embodiments, the composition (e.g. a pharmaceutical and/or diagnostic composition) may be formulated to ensure a desired in vivo distribution of a PD-L1 targeting molecule. For example, the blood-brain barrier excludes many large and/or hydrophilic compounds. To target a therapeutic molecule or composition to a particular in vivo location, they can be formulated, for example, in liposomes which may comprise one or more moieties that are selectively transported into specific cells or organs, thus enhancing targeted drug delivery. Illustrative targeting moieties include folate or biotin; mannosides; antibodies; surfactant protein A receptor; p120 catenin and the like.

[0646] Pharmaceutical compositions include parenteral formulations designed to be used as implants or particulate systems. Examples of implants are depot formulations composed of polymeric or hydrophobic components such as emulsions, ion exchange resins, and soluble salt solutions. Examples of particulate systems are microspheres, microparticles, nanocapsules, nanospheres, and nanoparticles (see e.g. Honda M et al., Int J Nanomedicine 8: 495-503 (2013); Sharma A et al., Biomed Res Int 2013: 960821 (2013); Ramishetti S, Huang L, Ther Deliv 3: 1429-45 (2012)). Controlled release formulations may be prepared using polymers sensitive to ions, such as, e.g. liposomes, polaxamer 407, and hydroxyapatite.

### VIII. Polynucleotides, Expression Vectors, and Host Cells

[0647] Beyond the polypeptides and PD-L1 targeting molecules described herein, the polynucleotides that encode the polypeptide components and PD-L1 targeting molecules, or functional portions thereof, are also described herein. The term “polynucleotide” is equivalent to the term “nucleic acid,” each of which includes one or more of: polymers of deoxyribonucleic acids (DNAs), polymers of ribonucleic acids (RNAs), analogs of these DNAs or RNAs generated using nucleotide analogs, and derivatives, fragments and homologs thereof. The polynucleotide may be single-, double-, or triple-stranded. Such polynucleotides are specifically disclosed to include all polynucleotides capable of encoding an illustrative protein, for example, taking into account the wobble known to be tolerated in the third position of RNA codons, yet encoding for the same amino acid as a different RNA codon (see Stothard P, Biotechniques 28: 1102-4 (2000)).

[0648] In some embodiments, a polynucleotide encodes a Shiga toxin effector polypeptide and/or PD-L1 targeting molecule, or a fragment or derivative thereof. The polynucleotides may include, e.g., a nucleic acid sequence encoding a polypeptide at least 50%, 55%, 60%, 65%, 70%, 75%, 80%, 85%, 90%, 95%, 99% or more, identical to a polypeptide comprising one of the amino acid sequences of a polypeptide or PD-L1 targeting molecule. In some embodiments, polynucleotides comprise nucleotide sequences that hybridize under stringent conditions to a polynucleotide which encodes a Shiga toxin effector polypeptide component and/or PD-L1 targeting molecule, or a fragment or derivative thereof, or the antisense or complement of any such sequence.

[0649] Derivatives or analogs of the PD-L1 targeting molecules (e.g., PD-L1 targeting molecules) include, inter alia, polynucleotide (or polypeptide) molecules having regions that are substantially homologous to the polynucleotides (or PD-L1 targeting molecules), e.g. by at least about 45%, 50%, 70%, 80%, 95%, 98%, or even 99% identity (with a preferred identity of 80-99%) over a polynucleotide (or polypeptide) sequence of the same size or when compared to an aligned sequence in which the alignment is done by a computer homology program known in the art. An example program is the GAP program (Wisconsin Sequence Analysis Package, Version 8 for UNIX, Genetics Computer Group, University Research Park, Madison, Wis., U.S.) using the default settings, which uses the algorithm of Smith T, Waterman M, Adv Appl Math 2: 482-9 (1981). Also included are polynucleotides capable of hybridizing to the complement of a sequence encoding the cell-targeting proteins under stringent conditions (see e.g. Ausubel F et al., Current Protocols in Molecular Biology (John Wiley & Sons, New York, N.Y., U.S., 1993)), and below. Stringent conditions are known to those skilled in the art and may be found, e.g., in Current Protocols in Molecular Biology (John Wiley & Sons, NY, U.S., Ch. Sec. 6.3.1-6.3.6 (1989)).

[0650] Also provided are expression vectors that comprise the polynucleotides described herein. The polynucleotides capable of encoding the Shiga toxin effector polypeptide components and/or PD-L1 targeting molecules may be inserted into known vectors, including bacterial plasmids, viral vectors and phage vectors, using material and methods well known in the art to produce expression vectors. Such expression vectors will include the polynucleotides necessary to support production of contemplated Shiga toxin effector polypeptides and/or PD-L1 targeting molecules within any host cell of choice or cell-free expression systems (e.g. pTxb1 and pIVEX2.3). The specific polynucleotides comprising expression vectors for use with specific types of host cells or cell-free expression systems are well known to one of ordinary skill in the art, can be determined using routine experimentation, and/or may be purchased.

[0651] The term “expression vector,” as used herein, refers to a polynucleotide, linear or circular, comprising one or more expression units. The term “expression unit” denotes a polynucleotide segment encoding a polypeptide of interest and capable of providing expression of the nucleic acid segment in a host cell. An expression unit typically comprises a transcription promoter, an open reading frame encoding the polypeptide of interest, and a transcription terminator, all in operable configuration. An expression vector contains one or more expression units. Thus, in some embodiments, an expression vector encoding a Shiga toxin effector polypeptide and/or PD-L1 targeting molecule comprising a single polypeptide chain includes at least an expression unit for the single polypeptide chain, whereas a protein comprising, e.g. two or more polypeptide chains (e.g. one chain comprising a V_{L} domain and a second chain comprising a V_{H} domain linked to a toxin effector polypeptide) includes at least two expression units, one for each of the two polypeptide chains of the protein. For expression of multi-chain cell-targeting proteins, an expression unit for each polypeptide chain may also be separately contained on different expression vectors (e.g. expression may be achieved with a single host cell into which expression vectors for each polypeptide chain has been introduced).

[0652] Expression vectors capable of directing transient or stable expression of polypeptides and proteins are well known in the art. The expression vectors generally include, but are not limited to, one or more of the following: a heterologous signal sequence or peptide, an origin of replication, one or more marker genes, an enhancer element, a promoter, and a transcription termination sequence, each of which is well known in the art. Optional regulatory control sequences, integration sequences, and useful markers that can be employed are known in the art.

[0653] The term “host cell” refers to a cell which can support the replication or expression of the expression vector. Host cells may be prokaryotic cells, such as E. coli or eukaryotic cells (e.g. yeast, insect, amphibian, bird, or mammalian cells). Creation and isolation of host cell lines comprising a polynucleotide or capable of producing a polypeptide and/or PD-L1 targeting molecule can be accomplished using standard techniques known in the art.

[0654] Shiga toxin effector polypeptides and/or proteins may be variants or derivatives of the polypeptides and molecules described herein that are produced by modifying the polynucleotide encoding a polypeptide and/or proteinaceous component of a PD-L1 targeting molecule by altering one or more amino acids or deleting or inserting one or more amino acids that may render it more suitable to achieve desired properties, such as more optimal expression by a host cell.

### IX. Molecules Immobilized on Solid Substrates

[0655] Some embodiments include a molecule described herein (e.g. a PD-L1 targeting molecule, fusion protein, or polynucleotide), or any effector fragment thereof, immobilized on a solid substrate. Solid substrates contemplated herein include, but are not limited to, microbeads, nanoparticles, polymers, matrix materials, microarrays, microtiter plates, or any solid surface known in the art (see e.g. U.S. Pat. No. 7,771,955). In accordance with these embodiments, a molecule may be covalently or non-covalently linked to a solid substrate, such as, e.g., a bead, particle, or plate, using techniques known to the skilled worker (see e.g. Jung Y et al., Analyst 133: 697-701 (2008)). Immobilized molecules may be used for screening applications using techniques known in the art (see e.g. Bradbury A et al., Nat Biotechnol 29: 245-54 (2011); Sutton C, Br J Pharmacol 166: 457-75 (2012); Diamante L et al., Protein Eng Des Sel 26: 713-24 (2013); Houlihan G et al., J Immunol Methods 405: 47-56 (2014)).

[0656] Non-limiting examples of solid substrates to which a molecule may be immobilized on include: microbeads, nanoparticles, polymers, nanopolymers, nanotubes, magnetic beads, paramagnetic beads, superparamagnetic beads, streptavidin coated beads, reverse-phase magnetic beads, carboxy terminated beads, hydrazine terminated beads, silica (sodium silica) beads and iminodiacetic acid (IDA)-modified beads, aldehyde-modified beads, epoxy-activated beads, diaminodipropylamine (DADPA)-modified beads (beads with primary amine surface group), biodegradable polymeric beads, polystyrene substrates, amino-polystyrene particles, carboxyl-polystyrene particles, epoxy-polystyrene particles, dimethylamino-polystyrene particles, hydroxy-polystyrene particles, colored particles, flow cytometry particles, sulfonate-polystyrene particles, nitrocellulose surfaces, reinforced nitrocellulose membranes, nylon membranes, glass surfaces, activated glass surfaces, activated quartz surfaces, polyvinylidene difluoride (PVDF) membranes, polyacrylamide-based substrates, poly-vinyl chloride substrates, poly-methyl methacrylate substrates, poly(dimethyl siloxane) substrates, and photopolymers which contain photoreactive species (such as nitrenes, carbenes, and ketyl radicals) capable of forming covalent linkages. Other examples of solid substrates to which a molecule may be immobilized on are commonly used in molecular display systems, such as, e.g., cellular surfaces, phages, and virus particles.

### X. Delivery Devices and Kits

[0657] In some embodiments, a device comprises one or more compositions of matter described herein, such as a pharmaceutical composition or diagnostic composition, for delivery to a subject in need thereof. Thus, a delivery device comprising one or more compositions can be used to administer to a patient a composition of matter by various delivery methods, including: intravenous, subcutaneous, intramuscular or intraperitoneal injection; oral administration; transdermal administration; pulmonary or transmucosal administration; administration by implant, osmotic pump, cartridge or micro pump; or by other means recognized by a person of skill in the art.

[0658] Also provided herein are kits comprising at least one composition of matter, and optionally, packaging and instructions for use. Kits may be useful for drug administration and/or diagnostic information gathering. A kit may optionally comprise at least one additional reagent (e.g., standards, markers and the like). Kits typically include a label indicating the intended use of the contents of the kit. The kit may further comprise reagents and other tools for detecting a cell type (e.g. a tumor cell) in a sample or in a subject, or for diagnosing whether a patient belongs to a group that responds to a therapeutic strategy which makes use of a compound, composition, or related method, e.g., such as a method described herein.

XI. Methods for Using PD-L1 Targeting Molecules and/or Pharmaceutical and/or Diagnostic Compositions Thereof

[0659] Generally, it is an object of the instant disclosure to provide pharmacologically active agents, as well as compositions comprising the same, that can be used in the prevention and/or treatment of diseases, disorders, and conditions, such as certain cancers, tumors, growth abnormalities, immune disorders, or further pathological conditions mentioned herein. Accordingly, also provided herein are methods of using the polypeptides, PD-L1 targeting molecules, and pharmaceutical compositions for the targeted killing of cells, for delivering additional exogenous materials into targeted cells, for labeling of the interiors of targeted cells, for collecting diagnostic information, for the delivering of T-cell epitopes to the MHC class I presentation pathway of target cells, and for treating diseases, disorders, and conditions as described herein. For example, the disclosed methods may be used to prevent or treat cancers, cancer initiation, tumor initiation, metastasis, and/or disease reoccurrence.

[0660] In particular, it is an object to provide such pharmacologically active agents, compositions, and/or methods that have certain advantages compared to the agents, compositions, and/or methods that are currently known in the art. Accordingly, in some embodiments, methods of using Shiga toxin effector polypeptides and PD-L1 targeting molecules with specified protein sequences and pharmaceutical compositions thereof are provided. For example, any of the amino acid sequences described herein may be specifically utilized as a component of the PD-L1 targeting molecule used in the following methods or any method for using a PD-L1 targeting molecule known to the skilled worker, such as, e.g., various methods described in WO 2014/164680, WO 2014/164693, WO 2015/138435, WO 2015/138452, WO 2015/113005, WO 2015/113007, WO 2015/191764, US20150259428, WO 2016/196344, WO 2017/019623, WO 2018/106895, and WO 2018/140427.

[0661] Also provided are methods of killing a cell comprising the step of contacting the cell, either in vitro or in vivo, with a Shiga toxin effector polypeptide, PD-L1 targeting molecule, or pharmaceutical composition. The Shiga toxin effector polypeptides, PD-L1 targeting molecules, and pharmaceutical compositions can be used to kill a specific cell type upon contacting a cell or cells with one of the claimed compositions of matter. In some embodiments, a PD-L1 targeting molecule or pharmaceutical composition can be used to kill specific cell types in a mixture of different cell types, such as mixtures comprising cancer cells, infected cells, and/or hematological cells. In some embodiments, a PD-L1 targeting molecule, or pharmaceutical composition can be used to kill cancer cells in a mixture of different cell types. In some embodiments, a cytotoxic Shiga PD-L1 targeting molecule, or pharmaceutical composition can be used to kill specific cell types in a mixture of different cell types, such as pre-transplantation tissues. In some embodiments, a Shiga toxin effector polypeptide, PD-L1 targeting molecule, or pharmaceutical composition can be used to kill specific cell types in a mixture of cell types, such as pre-administration tissue material for therapeutic purposes. In some embodiments, a PD-L1 targeting molecule or pharmaceutical composition can be used to selectively kill cells infected by viruses or microorganisms, or otherwise selectively kill cells expressing a particular extracellular target biomolecule, such as a cell surface biomolecule. The Shiga toxin effector polypeptides, PD-L1 targeting molecules, and pharmaceutical compositions have varied applications, including, e.g., uses in depleting unwanted cell types from tissues either in vitro or in vivo, uses in modulating immune responses to treat graft versus host, uses as antiviral agents, uses as anti-parasitic agents, and uses in purging transplantation tissues of unwanted cell types.

[0662] In some embodiments, certain Shiga toxin effector polypeptides, PD-L1 targeting molecules, and pharmaceutical compositions, alone or in combination with other compounds or pharmaceutical compositions, can show potent cell-kill activity when administered to a population of cells, in vitro or in vivo in a subject such as in a patient in need of treatment. By targeting the delivery of enzymatically active Shiga toxin A Subunit effector polypeptides and/or T-cell epitopes using high-affinity binding regions to specific cell types, cell-kill activities can be restricted to specifically and selectively killing certain cell types within an organism, such as certain cancer cells, neoplastic cells, malignant cells, non-malignant tumor cells, and/or infected cells.

[0663] Also provided is a method of killing a cell in a patient in need thereof, the method comprising the step of administering to the patient at least one PD-L1 targeting molecule or a pharmaceutical composition thereof.

[0664] In some embodiments, the PD-L1 targeting molecule or pharmaceutical compositions thereof can be used to kill a cancer cell in a patient by targeting an extracellular PD-L1 found physically coupled with a cancer or tumor cell. The terms “cancer cell” or “cancerous cell” refers to various neoplastic cells which grow and divide in an abnormally accelerated and/or unregulated fashion and will be clear to the skilled person. The term “tumor cell” includes both malignant and non-malignant cells. Generally, cancers and/or tumors can be defined as diseases, disorders, or conditions that are amenable to treatment and/or prevention. The cancers and tumors (either malignant or non-malignant) which are comprised of cancer cells and/or tumor cells which may benefit from methods and compositions will be clear to the skilled person. Neoplastic cells are often associated with one or more of the following: unregulated growth, lack of differentiation, local tissue invasion, angiogenesis, and metastasis. The diseases, disorders, and conditions resulting from cancers and/or tumors (either malignant or non-malignant) which may benefit from the methods and compositions targeting certain cancer cells and/or tumor cells will be clear to the skilled person.

[0665] Some embodiments of the PD-L1 targeting molecules and compositions may be used to kill cancer stem cells, tumor stem cells, pre-malignant cancer-initiating cells, and tumor-initiating cells, which commonly are slow dividing and resistant to cancer therapies like chemotherapy and radiation. For example, acute myeloid leukemias (AMLs) may be treated by killing AML stem cells and/or dormant AML progenitor cells (see e.g. Shlush L et al., Blood 120: 603-12 (2012)).

[0666] Because of the Shiga toxin A Subunit based mechanism of action, compositions of matter may be more effectively used in methods involving their combination with, or in complementary fashion with other therapies, such as, e.g., chemotherapies, immunotherapies, radiation, stem cell transplantation, and immune checkpoint inhibitors, and/or effective against chemoresistant/radiation-resistant and/or resting tumor cells/tumor initiating cells/stem cells. Similarly, compositions of matter may be more effectively used in methods involving in combination with other cell-targeted therapies targeting other than the same epitope on, non-overlapping, or different targets for the same disease disorder or condition.

[0667] Some embodiments of the PD-L1 targeting molecules, or pharmaceutical compositions thereof, can be used to kill an immune cell (whether healthy or malignant) in a patient by targeting an extracellular PD-L1 found physically coupled with an immune cell.

[0668] Ins ome embodiments, a PD-L1 targeting molecule, or pharmaceutical composition thereof, may be uiltized for the purposes of purging patient cell populations (e.g. bone marrow) of malignant, neoplastic, or otherwise unwanted T-cells and/or B-cells and then reinfusing the T-cell and/or B-cells depleted material into the patient (see e.g. van Heeckeren W et al., Br J Haematol 132: 42-55 (2006); (see e.g. Alpdogan O, van den Brink M, Semin Oncol 39: 629-42 (2012)).

[0669] In some embodiments, the PD-L1 targeting molecule, or pharmaceutical composition thereof, is utilized for the purposes of ex vivo depletion of T cells and/or B-cells from isolated cell populations removed from a patient. In one non-limiting example, the PD-L1 targeting molecule can be used in a method for prophylaxis of organ and/or tissue transplant rejection wherein the donor organ or tissue is perfused prior to transplant with a cytotoxic, PD-L1 targeting molecule or a pharmaceutical composition thereof in order to purge the organ of donor T-cells and/or B-cells (see e.g. Alpdogan O, van den Brink M, Semin Oncol 39: 629-42 (2012)).

[0670] In some embodiments, the PD-L1 targeting molecule, or pharmaceutical composition thereof, is utilized for the purposes of depleting T-cells and/or B-cells from a donor cell population as a prophylaxis against graft-versus-host disease, and induction of tolerance, in a patient to undergo a bone marrow and or stem cell transplant (see e.g. van Heeckeren W et al., Br J Haematol 132: 42-55 (2006); (see e.g. Alpdogan O, van den Brink M, Semin Oncol 39: 629-42 (2012)).

[0671] In some embodiments of the Shiga toxin effector polypeptide or PD-L1 targeting molecule, or pharmaceutical compositions thereof, can be used to kill an infected cell in a patient by targeting an extracellular PD-L1 found physically coupled with an infected cell.

[0672] In some embodiments of the PD-L1 targeting molecules, or pharmaceutical compositions thereof, can be used to “seed” a locus within a chordate with non-self, T-cell epitope-peptide presenting cells in order to activate the immune system to enhance policing of the locus. In some embodiments of this “seeding” method, the locus is a tumor mass or infected tissue site. In preferred embodiments of this “seeding” method, the non-self, T-cell epitope-peptide is selected from the group consisting of: peptides not already presented by the target cells of the PD-L1 targeting molecule, peptides not present within any protein expressed by the target cell, peptides not present within the proteome or transcriptome of the target cell, peptides not present in the extracellular microenvironment of the site to be seeded, and peptides not present in the tumor mass or infect tissue site to be targeting.

[0673] This “seeding” method functions to label one or more target cells within a chordate with one or more MHC class I presented T-cell epitopes for recognition by effector T-cells and activation of downstream immune responses. By exploiting the cell internalizing, intracellularly routing, and T-cell epitope delivering functions of the PD-L1 targeting molecules, the target cells which display the delivered T-cell epitope are harnessed to induce recognition of the presenting target cell by host T-cells and induction of further immune responses including target-cell-killing by CTLs. This “seeding” method of using a PD-L1 targeting molecule can provide a temporary vaccination-effect by inducing adaptive immune responses to attack the cells within the seeded microenvironment, such as, e.g. a tumor mass or infected tissue site, whether presenting a PD-L1 targeting molecule-delivered T-cell epitope(s) or not. This “seeding” method may also induce the breaking of immuno-tolerance to a target cell population, a tumor mass, and/or infected tissue site within a chordate.

[0674] Certain methods involving the seeding of a locus within a chordate with one or more antigenic and/or immunogenic epitopes may be combined with the administration of immunologic adjuvants, whether administered locally or systemically, to stimulate the immune response to certain antigens, such as, e.g., the co-administration of a composition with one or more immunologic adjuvants like a cytokine, bacterial product, or plant saponin. Other examples of immunologic adjuvants which may be suitable for use in the methods include aluminum salts and oils, such as, e.g., alums, aluminum hydroxide, mineral oils, squalene, paraffin oils, peanut oils, and thimerosal.

[0675] Additionally, provided herein is a method of treating a disease, disorder, or condition in a patient comprising the step of administering to a patient in need thereof a therapeutically effective amount of at least one of the PD-L1 targeting molecules, or a pharmaceutical composition thereof. Contemplated diseases, disorders, and conditions that can be treated using this method include cancers, malignant tumors, non-malignant tumors, growth abnormalities, immune disorders, and microbial infections. Administration of a “therapeutically effective dosage” of a composition can result in a decrease in severity of disease symptoms, an increase in frequency and duration of disease symptom-free periods, or a prevention of impairment or disability due to the disease affliction.

[0676] The therapeutically effective amount of a composition will depend on the route of administration, the type of organism being treated, and the physical characteristics of the specific patient under consideration. These factors and their relationship to determining this amount are well known to skilled practitioners in the medical arts. This amount and the method of administration can be tailored to achieve optimal efficacy, and may depend on such factors as weight, diet, concurrent medication and other factors, well known to those skilled in the medical arts. The dosage sizes and dosing regimen most appropriate for human use may be guided by the results obtained, and may be confirmed in properly designed clinical trials. An effective dosage and treatment protocol may be determined by conventional means, starting with a low dose in laboratory animals and then increasing the dosage while monitoring the effects, and systematically varying the dosage regimen as well. Numerous factors may be taken into consideration by a clinician when determining an optimal dosage for a given subject. Such considerations are known to the skilled person.

[0677] An acceptable route of administration may refer to any administration pathway known in the art, including but not limited to aerosol, enteral, nasal, ophthalmic, oral, parenteral, rectal, vaginal, or transdermal (e.g. topical administration of a cream, gel or ointment, or by means of a transdermal patch). “Parenteral administration” is typically associated with injection at or in communication with the intended site of action, including infraorbital, infusion, intraarterial, intracapsular, intracardiac, intradermal, intramuscular, intraperitoneal, intrapulmonary, intraspinal, intrasternal, intrathecal, intrauterine, intravenous, subarachnoid, subcapsular, subcutaneous, transmucosal, or transtracheal administration.

[0678] For administration of a pharmaceutical composition, the dosage range will generally be from about 0.001 to 10 milligrams per kilogram (mg/kg), and more, usually 0.001 to 0.5 mg/kg, of the subject's body weight. Suitable dosages may be 0.01 mg/kg body weight, 0.03 mg/kg body weight, 0.07 mg/kg body weight, 0.9 mg/kg body weight or 0.1 mg/kg body weight or within the range of 0.01 to 0.1 mg/kg. A suitable treatment regime is a once or twice daily administration, or a once or twice weekly administration, once every two weeks, once every three weeks, once every four weeks, once a month, once every two or three months or once every three to 6 months. Dosages may be selected and readjusted by the skilled health care professional as required to maximize therapeutic benefit for a particular patient.

[0679] Pharmaceutical compositions will typically be administered to the same patient on multiple occasions. Intervals between single dosages can be, for example, two to five days, weekly, monthly, every two or three months, every six months, or yearly. Intervals between administrations can also be irregular, based on regulating blood levels or other markers in the subject or patient. Dosage regimens for a composition include intravenous administration of 1 mg/kg body weight or 3 mg/kg body weight with the composition administered every two to four weeks for six dosages, then every three months at 3 mg/kg body weight or 1 mg/kg body weight.

[0680] A pharmaceutical composition may be administered via one or more routes of administration, using one or more of a variety of methods known in the art. As will be appreciated by the skilled worker, the route and/or mode of administration will vary depending upon the desired results. Routes of administration for PD-L1 targeting molecules and pharmaceutical compositions include, e.g. intravenous, intramuscular, intradermal, intraperitoneal, subcutaneous, spinal, or other parenteral routes of administration, for example by injection or infusion. For other embodiments, a PD-L1 targeting molecule or pharmaceutical composition may be administered by a non-parenteral route, such as a topical, epidermal or mucosal route of administration, for example, intranasally, orally, vaginally, rectally, sublingually, or topically.

[0681] Therapeutic PD-L1 targeting molecules or pharmaceutical compositions may be administered with one or more of a variety of medical devices known in the art. For example, in one embodiment, a pharmaceutical composition may be administered with a needleless hypodermic injection device. Examples of well-known implants and modules are in the art, including e.g., implantable micro-infusion pumps for controlled rate delivery; devices for administering through the skin; infusion pumps for delivery at a precise infusion rate; variable flow implantable infusion devices for continuous drug delivery; and osmotic drug delivery systems. These and other such implants, delivery systems, and modules are known to those skilled in the art.

[0682] The PD-L1 targeting molecule or pharmaceutical composition may be administered alone or in combination with one or more other therapeutic or diagnostic agents. A combination therapy may include a PD-L1 targeting molecule, or pharmaceutical composition thereof, combined with at least one other therapeutic agent selected based on the particular patient, disease or condition to be treated. Examples of other such agents include, inter alia, a cytotoxic, anti-cancer or chemotherapeutic agent, an anti-inflammatory or anti-proliferative agent, an antimicrobial or antiviral agent, growth factors, cytokines, an analgesic, a therapeutically active small molecule or polypeptide, a single chain antibody, a classical antibody or fragment thereof, or a nucleic acid molecule which modulates one or more signaling pathways, and similar modulating therapeutic molecules which may complement or otherwise be beneficial in a therapeutic or prophylactic treatment regimen.

[0683] Treatment of a patient with PD-L1 targeting molecule or pharmaceutical composition preferably leads to cell death of targeted cells and/or the inhibition of growth of targeted cells. As such, cytotoxic, PD-L1 targeting molecules, and pharmaceutical compositions comprising them, will be useful in methods for treating a variety of pathological disorders in which killing or depleting target cells may be beneficial, such as, inter alia, cancer, tumors, other growth abnormalities, immune disorders, and infected cells. In some embodiments, a method comprises suppressing cell proliferation, and treating cell disorders, including neoplasia, overactive B-cells, and overactive T-cells.

[0684] In some embodiments, the PD-L1 targeting molecules and pharmaceutical compositions can be used to treat or prevent cancers, tumors (malignant and non-malignant), growth abnormalities, immune disorders, and microbial infections. In a further aspect, the above ex vivo method can be combined with the above in vivo method to provide methods of treating or preventing rejection in bone marrow transplant recipients, and for achieving immunological tolerance.

[0685] In some embodiments, a method for treating malignancies or neoplasms and other blood cell associated cancers in a mammalian subject, such as a human, comprises the step of administering to a subject in need thereof a therapeutically effective amount of a cytotoxic PD-L1 targeting molecule or pharmaceutical composition.

[0686] The PD-L1 targeting molecules and pharmaceutical compositions have varied applications, including, e.g., uses in removing unwanted T-cells, uses in modulating immune responses to treat graft versus host, uses as antiviral agents, uses as antimicrobial agents, and uses in purging transplantation tissues of unwanted cell types. The PD-L1 targeting molecules and pharmaceutical compositions are commonly anti-neoplastic agents—meaning they are capable of treating and/or preventing the development, maturation, or spread of neoplastic or malignant cells by inhibiting the growth and/or causing the death of cancer or tumor cells.

[0687] In some embodiments, the PD-L1 targeting molecule or pharmaceutical composition is used to treat a B-cell-, plasma cell- or antibody-mediated disease or disorder, such as for example leukemia, lymphoma, myeloma, Human Immunodeficiency Virus (HIV) related diseases, amyloidosis, hemolytic uremic syndrome, polyarteritis, septic shock, Crohn's Disease, rheumatoid arthritis, ankylosing spondylitis, psoriatic arthritis, ulcerative colitis, psoriasis, asthma, Sjorgren's syndrome, graft-versus-host disease, graft rejection, diabetes, vasculitis, scleroderma, and systemic lupus erythematosus.

[0688] In another aspect, some embodiments of the PD-L1 targeting molecules and pharmaceutical compositions are antimicrobial agents—meaning they are capable of treating and/or preventing the acquisition, development, or consequences of microbiological pathogenic infections, such as caused by viruses, bacteria, fungi, prions, or protozoans.

[0689] In some embodiments, a prophylaxis or treatment is provided for diseases or conditions mediated by T-cells or B-cells by administering the PD-L1 targeting molecule, or a pharmaceutical composition thereof, to a patient for the purpose of killing T-cells or B-cells in the patient. This usage is compatible with preparing or conditioning a patient for bone marrow transplantation, stem cell transplantation, tissue transplantation, or organ transplantation, regardless of the source of the transplanted material, e.g. human or non-human sources.

[0690] In some embodiments, host-versus-graft disease is treated or prevented in a bone-marrow receipient via the targeted cell-killing of host T-cells using a cytotoxic PD-L1 targeting molecule or pharmaceutical composition described herein.

[0691] Some embodiments of the PD-L1 targeting molecules and pharmaceutical compositions can be utilized in a method of treating cancer comprising administering to a patient, in need thereof, a therapeutically effective amount of a PD-L1 targeting molecule and/or pharmaceutical composition. In some embodiments, the cancer being treated is selected from the group consisting of: bone cancer (such as multiple myeloma or Ewing's sarcoma), breast cancer, central/peripheral nervous system cancer (such as brain cancer, neurofibromatosis, or glioblastoma), gastrointestinal cancer (such as stomach cancer or colorectal cancer), germ cell cancer (such as ovarian cancers and testicular cancers, glandular cancer (such as pancreatic cancer, parathyroid cancer, pheochromocytoma, salivary gland cancer, or thyroid cancer), head-neck cancer (such as nasopharyngeal cancer, oral cancer, or pharyngeal cancer), hematological cancers (such as leukemia, lymphoma, or myeloma), kidney-urinary tract cancer (such as renal cancer and bladder cancer), liver cancer, lung/pleura cancer (such as mesothelioma, small cell lung carcinoma, or non-small cell lung carcinoma), prostate cancer, sarcoma (such as angiosarcoma, fibrosarcoma, Kaposi's sarcoma, or synovial sarcoma), skin cancer (such as basal cell carcinoma, squamous cell carcinoma, or melanoma), and uterine cancer.

[0692] Some embodiments of the PD-L1 targeting molecules and pharmaceutical compositions can be utilized in a method of treating an immune disorder comprising administering to a patient, in need thereof, a therapeutically effective amount of the PD-L1 targeting molecules and/or pharmaceutical composition. In some embodiments, the immune disorder is related to an inflammation associated with a disease selected from the group consisting of: amyloidosis, ankylosing spondylitis, asthma, Crohn's disease, diabetes, graft rejection, graft-vs.-host disease, Hashimoto's thyroiditis, hemolytic uremic syndrome, HIV-related diseases, lupus erythematosus, multiple sclerosis, polyarteritis, psoriasis, psoriatic arthritis, rheumatoid arthritis, scleroderma, septic shock, Sjörgren's syndrome, ulcerative colitis, and vasculitis.

[0693] In some embodiments, a Shiga toxin effector polypeptide or PD-L1 targeting molecule is used as a component of a pharmaceutical composition or medicament for the treatment or prevention of a cancer, tumor, other growth abnormality, immune disorder, and/or microbial infection. For example, immune disorders presenting on the skin of a patient may be treated with such a medicament in efforts to reduce inflammation. In another example, skin tumors may be treated with such a medicament in efforts to reduce tumor size or eliminate the tumor completely.

[0694] Certain cytotoxic PD-L1 targeting molecules, and compositions thereof, may be used in molecular neurosurgery applications such as immunolesioning and neuronal tracing (see, Wiley R, Lappi D, Adv Drug Deliv Rev 55: 1043-54 (2003), for review). For example, the targeting domain may be selected or derived from various ligands, such as neurotransmitters and neuropeptides, which target specific neuronal cell types by binding neuronal surface receptors, such as a neuronal circuit specific G-protein coupled receptor. Similarly, the targeting domain may be selected from or derived from antibodies that bind neuronal surface receptors. Because certain Shiga toxin effector polypeptides robustly direct their own retrograde axonal transport, certain PD-L1 targeting molecules may be used to kill a neuron(s) which expresses the extracellular target at a site of cytotoxic protein injection distant from the cell body (see Llewellyn-Smith I et al., J Neurosci Methods 103: 83-90 (2000)). These targeted cytotoxic molecules that specifically target neuronal cell types have uses in neuroscience research, such as for elucidating mechanisms of sensations (see e.g. Mishra S, Hoon M, Science 340: 968-71 (2013), and creating model systems of neurodegenerative diseases, such as Parkinson's and Alzheimer's (see e.g. Hamlin A et al., PLoS One e53472 (2013)).

[0695] In some embodiments, a Shiga toxin effector polypeptide, PD-L1 targeting molecule, pharmaceutical composition, and/or diagnostic composition is used to label or detect the interiors of neoplastic cells and/or immune cell types. This method may be based on the ability of certain PD-L1 targeting molecules to enter specific cell types and route within cells via retrograde intracellular transport, to the interior compartments of specific cell types are labeled for detection. This can be performed on cells in situ within a patient or on cells and tissues removed from an organism, e.g. biopsy material.

[0696] In some embodiments, a method to detect the presence of a cell type for the purpose of information gathering regarding diseases, conditions and/or disorders comprises using a Shiga toxin effector polypeptide, PD-L1 targeting molecule, pharmaceutical composition, and/or diagnostic composition. The method may comprise contacting a cell with a diagnostically sufficient amount of a PD-L1 targeting molecule in order to detect the molecule by an assay or diagnostic technique. The phrase “diagnostically sufficient amount” refers to an amount that provides adequate detection and accurate measurement for information gathering purposes by the particular assay or diagnostic technique utilized. Generally, the diagnostically sufficient amount for whole organism in vivo diagnostic use will be a non-cumulative dose of between 0.001 to 10 milligrams of the detection promoting agent linked PD-L1 targeting molecule per kg of subject per subject. Typically, the amount of Shiga toxin effector polypeptide or PD-L1 targeting molecule used in these information gathering methods will be as low as possible provided that it is still a diagnostically sufficient amount. For example, for in vivo detection in an organism, the amount of Shiga toxin effector polypeptide, PD-L1 targeting molecule, or pharmaceutical composition administered to a subject will be as low as feasibly possible.

[0697] The cell-type specific targeting of PD-L1 targeting molecules combined with detection promoting agents provides a way to detect and image cells physically coupled with an extracellular PD-L1 bound by the binding region of the molecule. Imaging of cells using the PD-L1 targeting molecules may be performed in vitro or in vivo by any suitable technique known in the art. Diagnostic information may be collected using various methods known in the art, including whole body imaging of an organism or using ex vivo samples taken from an organism. The term “sample” used herein refers to any number of things, but not limited to, fluids such as blood, urine, serum, lymph, saliva, anal secretions, vaginal secretions, and semen, and tissues obtained by biopsy procedures. For example, various detection promoting agents may be utilized for non-invasive in vivo tumor imaging by techniques such as magnetic resonance imaging (MRI), optical methods (such as direct, fluorescent, and bioluminescent imaging), positron emission tomography (PET), single-photon emission computed tomography (SPECT), ultrasound, x-ray computed tomography, and combinations of the aforementioned (see, Kaur S et al., Cancer Lett 315: 97-111 (2012), for review).

[0698] Also provided herein is a method of using a Shiga toxin effector polypeptide, PD-L1 targeting molecule, or pharmaceutical composition in a diagnostic composition to label or detect the interiors of a hematologic cell, cancer cell, tumor cell, infected cell, and/or immune cell (see e.g., Koyama Y et al., Clin Cancer Res 13: 2936-45 (2007); Ogawa M et al., Cancer Res 69: 1268-72 (2009); Yang L et al., Small 5: 235-43 (2009)). Based on the ability of certain PD-L1 targeting molecules to enter specific cell types and route within cells via retrograde intracellular transport, the interior compartments of specific cell types are labeled for detection. This can be performed on cells in situ within a patient or on cells and tissues removed from an organism, e.g. biopsy material.

[0699] Diagnostic compositions described herein may be used to characterize a disease, disorder, or condition as potentially treatable by a related pharmaceutical composition. In some embodiments, a composition may be used to determine whether a patient belongs to a group that responds to a therapeutic strategy which makes use of a compound, composition or related method as described herein or is well suited for using a delivery device.

[0700] Diagnostic compositions may be used after a disease, e.g. a cancer, is detected in order to better characterize it, such as to monitor distant metastases, heterogeneity, and stage of cancer progression. The phenotypic assessment of disease disorder or infection can help prognostic and prediction during therapeutic decision making. In disease reoccurrence, certain methods may be used to determine if local or systemic problem.

[0701] Diagnostic compositions may be used to assess responses to therapies regardless of the type of the type of therapy, e.g. small molecule drug, biological drug, or cell-based therapy. For example, some embodiments of the diagnostics may be used to measure changes in tumor size, changes in antigen positive cell populations including number and distribution, or monitoring a different marker than the antigen targeted by a therapy already being administered to a patient (see Smith-Jones P et al., Nat. Biotechnol 22: 701-6 (2004); Evans M et al., Proc. Natl. Acad. Sci. USA 108: 9578-82 (2011)).

[0702] In some embodiments of the method used to detect the presence of a cell type may be used to gather information regarding diseases, disorders, and conditions, such as, for example bone cancer (such as multiple myeloma or Ewing's sarcoma), breast cancer, central/peripheral nervous system cancer (such as brain cancer, neurofibromatosis, or glioblastoma), gastrointestinal cancer (such as stomach cancer or colorectal cancer), germ cell cancer (such as ovarian cancers and testicular cancers, glandular cancer (such as pancreatic cancer, parathyroid cancer, pheochromocytoma, salivary gland cancer, or thyroid cancer), head-neck cancer (such as nasopharyngeal cancer, oral cancer, or pharyngeal cancer), hematological cancers (such as leukemia, lymphoma, or myeloma), kidney-urinary tract cancer (such as renal cancer and bladder cancer), liver cancer, lung/pleura cancer (such as mesothelioma, small cell lung carcinoma, or non-small cell lung carcinoma), prostate cancer, sarcoma (such as angiosarcoma, fibrosarcoma, Kaposi's sarcoma, or synovial sarcoma), skin cancer (such as basal cell carcinoma, squamous cell carcinoma, or melanoma), uterine cancer, AIDS, amyloidosis, ankylosing spondylitis, asthma, autism, cardiogenesis, Crohn's disease, diabetes, erythematosus, gastritis, graft rejection, graft-versus-host disease, Grave's disease, Hashimoto's thyroiditis, hemolytic uremic syndrome, HIV-related diseases, lupus erythematosus, lymphoproliferative disorders (including post-transplant lymphoproliferative disorders), multiple sclerosis, myasthenia gravis, neuroinflammation, polyarteritis, psoriasis, psoriatic arthritis, rheumatoid arthritis, scleroderma, septic shock, Sjörgren's syndrome, systemic lupus erythematosus, ulcerative colitis, vasculitis, cell proliferation, inflammation, leukocyte activation, leukocyte adhesion, leukocyte chemotaxis, leukocyte maturation, leukocyte migration, neuronal differentiation, acute lymphoblastic leukemia (ALL), T acute lymphocytic leukemia/lymphoma (ALL), acute myelogenous leukemia, acute myeloid leukemia (AML), B-cell chronic lymphocytic leukemia (B-CLL), B-cell prolymphocytic lymphoma, Burkitt's lymphoma (BL), chronic lymphocytic leukemia (CLL), chronic myelogenous leukemia (CIVIL-BP), chronic myeloid leukemia (CML), diffuse large B-cell lymphoma, follicular lymphoma, hairy cell leukemia (HCL), Hodgkin's Lymphoma (HL), intravascular large B-cell lymphoma, lymphomatoid granulomatosis, lymphoplasmacytic lymphoma, MALT lymphoma, mantle cell lymphoma, multiple myeloma (MM), natural killer cell leukemia, nodal marginal B-cell lymphoma, Non-Hodgkin's lymphoma (NHL), plasma cell leukemia, plasmacytoma, primary effusion lymphoma, pro-lymphocytic leukemia, promyelocytic leukemia, small lymphocytic lymphoma, splenic marginal zone lymphoma, T-cell lymphoma (TCL), heavy chain disease, monoclonal gammopathy, monoclonal immunoglobulin deposition disease, myelodusplastic syndromes (MDS), smoldering multiple myeloma, and Waldenstrom macroglobulinemia.

[0703] In some embodiments, the Shiga toxin effector polypeptides and PD-L1 targeting molecules, or pharmaceutical compositions thereof, are used for both diagnosis and treatment, or for diagnosis alone. In some situations, it would be desirable to determine or verify the HLA variant(s) and/or HLA alleles expressed in the subject and/or diseased tissue from the subject, such as, e.g., a patient in need of treatment, before selecting a Shiga toxin effector polypeptide or PD-L1 targeting molecule for use in treatment(s).

[0704] Any embodiment of the PD-L1 targeting molecule may be used with each individual embodiment of the methods.

[0705] The present invention is further illustrated by the following non-limiting examples of PD-L1 targeting molecules capable of specifically targeting PD-L1.

### EXAMPLES

[0706] The following examples demonstrate some embodiments of the compositions and methods described herein. However, it is to be understood that these examples are for illustration purposes only and do not intend, nor should any be construed, to be wholly definitive as to conditions and scope of this invention. The experiments in the following examples were carried out using standard techniques, which are well known and routine to those of skill in the art, except where otherwise described.

[0707] The following examples describe several, illustrative, PD-L1 targeting molecules. Each illustrative PD-L1 targeting molecule comprises at least one Shiga toxin A Subunit effector polypeptide linked, either directly or indirectly, to a cell-targeting binding region capable of specifically binding an extracellular part of a PD-L1 target biomolecule physically associated with a cellular surface of a cell. The Shiga toxin effector polypeptides in the Examples are de-immunized while retaining catalytic and/or cytotoxic activities, unless indicated herein as “inactivated.” Some of the illustrative PD-L1 targeting molecules comprise at least one Shiga toxin effector polypeptide component which (1) is de-immunized; (2) is on or proximal to an amino-terminus of a single-chain polypeptide component of the PD-L1 targeting molecule; (3) is furin-cleavage resistant; and/or (4) comprises an embedded CD8+ T-cell epitope (“C1”) that is heterologous to Shiga toxins.

[0708] The illustrative, cytotoxic, PD-L1 targeting molecules described below bound to cell-surface PD-L1 molecules expressed by targeted, tumor cell-types and were internalized by the targeted cells. Some of the internalized, PD-L1 targeting molecules shown in the Examples effectively routed their Shiga toxin effector polypeptides to the cytosols of target cells where the Shiga toxin effector polypeptides inactivated ribosomes and subsequently caused the apoptotic death of the targeted cells. In addition, certain, illustrative PD-L1 targeting molecules were able to effectively deliver immunogenic, T-cell epitopes to the WIC class I pathway of target cells to induce intercellular T-cell engagement, resulting in cytokine secretion and/or target cell killing.

### Example 1. Illustrative PD-L1 Targeting Molecules can Directly Kill Target Cells and Induce Indirect, Immune-Cell Mediated, Target Cell Killing

### I. Construction of Illustrative PD-L1 Targeting Molecules

[0709] Illustrative PD-L1 targeting molecules were created and tested. The PD-L1 targeting molecules each comprised one or more fusion proteins comprising 1) a PD-L1 binding region comprising an immunoglobulin-type binding domain and 2) a de-immunized Shiga toxin effector A Subunit polypeptide component which is furin-cleavage resistant. All of the PD-L1 targeting molecules tested in the experiments of this Example were produced in a bacterial system and purified by column chromatography using techniques known to the skilled worker. Catalytically inactive Shiga toxin effector polypeptides were used in some of the PD-L1 targeting molecules to help differentiate enzymatic contributions to target cell killing from CD8+ T-cell epitope delivery contributions. The PD-L1 targeting molecules comprising a catalytically inactive Shiga toxin effector polypeptide are labeled in the Examples as “inactivated.” Each of these inactivated molecules comprises a single amino acid residue substitution which severly reduces Shiga toxin A subunit catalytic activity in vitro.

[0710] The illustrative PD-L1 targeting molecules that were produced and tested in this Example (see Table 4, below) include those comprising a binding region having the amino acid sequence of SEQ ID NO: 38 (scFva) or SEQ ID NO: 39 (scFvb). Some of the PD-L1 binding molecules also comprise one or more copies of a CD8+ T-cell epitope (C1, SEQ ID NO: 77), and some comprise an endoplasmic reticulum retention/signal motif (ER).

TABLE 4
PD-L1 Targeting Molecules

| | SEQ ID NO |
|---|---|
| PD-L1 binding molecule | (Molecule No) |
| DI-SLTA-1::scFva::C1 | 191 (115694) |
| DI-SLTA-1::scFva | 86 (115695) |
| DI-SLTA-1::scFva::C1::C1 | 87 (115765) |
| inactivated DI-SLTA-1::scFva::C1::C1 | 88 (115826) |
| DI-SLTA-1::scFvb::C1 | 85 |
| DI-SLTA-1::scFvb | 84 |
| ER-DI-SLTA-1::scFva::C1::C1 | 212 (115773) |

### II. PD-L1 Binding by Illustrative PD-L1 Targeting Molecules

[0711] The binding of the illustrative PD-L1 targeting molecule to a PD-L1 molecule can be analyzed using standard techniques. For example, purified recombinant PD-L1 can be used to characterize a PD-L1 targeting molecule's binding characterstics, such as, e.g., using an ELISA assay. To perform a PD-L1 target binding ELISA, plates are coated with human, cynomolgus monkey or mouse recombinant PD-L1 targeted by the scFv component of the PD-L1 targeting molecule. Preparations are made in PBS and incubated overnight at 4 degrees Celsius (° C.). The plates are blocked with 3% milk-PBS-T for 2 hours, then washed and incubated for 1 hour at room temperature with PD-L1 targeting molecule. The plates are washed again with PBS-T and incubated for 1 hour at room temperature with a mouse monoclonal antibody that binds to the Shiga toxin derived component of the PD-L1 targeting molecule. The plates are washed with PBS-T, then incubated with anti-mouse Fc-HRP antibody for 1 hour at room temperature. Following the incubation, the plates are washed again with PBS-T. Binding of PD-L1 targeting molecules is detected following incubation with TMB Ultra reagent (Thermo Fisher Scientific, Waltham Mass., U.S.) and the stopping of the reaction with HCl. Absorbance is then measured at 450 nanometer (nm).

[0712] The binding specificity, affinity, and selectivity of an illustrative PD-L1 targeting molecule were tested by analyzing binding to a membrane proteome array, which comprised 5,300 different human proteins known to be expressed on the cell surface of HEK-293T cells (Integral Molecular, Inc., Philadelphia, Pa., U.S.). Only human PD-L1 (CD274) was identified and validated among the 5,300 proteins as a bound target for DI-SLTA-1::scFva::C1 (SEQ ID NO:191), DI-SLTA-1::scFva::C1::C1 (SEQ ID NO: 87), and DI-SLTA-1::scFva (SEQ ID NO:86). Both DI-SLTA-1::scFva::C1 and DI-SLTA-1::scFva exhibited robust and specific binding to human PD-L1 (FIG. 13A-13B).

[0713] A routine method involving a mutational analysis known to the skilled worker was used to evaluate critical contact points or “hotspots” in the PD-L1 binding regions (see e.g. Zhang et al., Oncotarget, 2017). Contact residues for DI-SLTA-1::scFva::C1, DI-SLTA-1::scFva::C1::C1, and DI-SLTA-1::scFva binding to human PD-L1 where mapped to residues F42, D122, and Y123. Critical contact residues for DI-SLTA-1::scFva::C1 binding to human PD-L1 where mapped to residues F42, D122, and Y123 within PD-L1.

### III. PD-L1 Expressing Target Cell Binding by Illustrative PD-L1 Targeting Molecules was Evaluated Using Target Positive Cell Lines

[0714] The binding of illustrative PD-L1 targeting molecules to a PD-L1 expressing cell can be analyzed using standard techniques, for example using indirect flow cytometry methods.

[0715] The binding characteristics of various illustrative PD-L1 targeting molecules to their biomolecular targets was determined using an indirect flow cytometry-based assay known to the skilled worker. For each reaction, about 0.3×10⁶ cells expressing PD-L1 were collected, washed in PBS+1% BSA and incubated for 1 hour at 4° C. with serial dilutions of a PD-L1 targeting molecule sample. After incubation, the cells were washed and incubated for one hour at 4° C. with a FITC-conjugated antibody, which bound to the SLT-1A component of the PD-L1 targeting molecules. Cells were then washed and resuspended in PBS and analyzed by flow-cytometry (Athena, Cytek Bio) using the blue laser (488 nm excitation). Target cells incubated with anti-SLT-1A-FITC only were used as the background control. Mean fluorescent intensity (MFI) values were normalized by subtracting the MFI of background controls and plotted as a function of concentration.

[0716] Target cell binding profiles of illustrative PD-L1 targeting molecules are shown in FIG. 2. Specifically, FIG. 2 shows the amount of binding of illustrative PD-L1 targeting molecules DI-SLTA-1::scFvb::C1 (SEQ ID NO:85) and DI-SLTA-1::scFva::C1::C1 (SEQ ID NO: 87) to PD-L1 positive HCC1954 cells at different concentrations of PD-L1 targeting molecule. On the Y-axis is plotted the percentage of maximum mean fluorescence intensity (MFI) for PD-L1 targeting molecule, and the X-axis shows PD-L1 targeting molecule concentration in ng/mL. These data demonstrate that illustrative PD-L1 targeting molecules bind human PD-L1 with nanomolar (nM) affinity.

### IV. Testing the Cytotoxic Activities of Illustrative PD-L1 Targeting Molecules

[0717] The cytotoxic activities of illustrative PD-L1 targeting molecules are measured using a tissue culture cell-based toxicity assay. The assays use either target biomolecule positive (PD-L1+) or target biomolecule negative (PD-L1−) cells.

[0718] In this example, the cell-kill assays were performed as follows. Human tumor cell line cells were plated (typically at 2×10³ cells per well for adherent cells, plated the day prior to protein addition, or 7.5×10³ cells per well for suspension cells, plated the same day as protein addition) in 20 μL cell culture medium in 384-well plates. A series of 10-fold dilutions of the proteins to be tested was prepared in an appropriate buffer, and 5 μL of the dilutions or only buffer as a negative control were added to the cells. Control wells containing only cell culture medium were used for baseline correction. The cell samples were incubated with the proteins or just buffer for 3 or 5 days at 37° C. and in an atmosphere of 5% carbon dioxide (CO₂). The total cell survival or percent viability was determined using a luminescent readout using the CellTiter-Glo® Luminescent Cell Viability Assay (G7573 Promega Madison, Wis., U.S.) according to the manufacturer's instructions as measured in relative light units (RLU). The Percent Viability of experimental wells was calculated using the following equation: (Test RLU−Average Media RLU)÷(Average Cells RLU−Average Media RLU)×100. Log protein concentration versus Percent Viability was plotted in Prism (GraphPad Prism, San Diego, Calif., U.S.) and log (inhibitor) versus response (3 parameter) analysis were used to determine the half-maximal cytotoxic concentration (CD₅₀) value (i.e., the concentration of exogenously administered PD-L1 targeting molecule which kills half the cells in a homogenous cell population) for the tested proteins. The CD₅₀ values for each illustrative PD-L1 targeting molecule tested was calculated when possible.

[0719] FIG. 3 shows the cytotoxicity of illustrative PD-L1 targeting molecules DI-SLTA-1::scFvb::C1 (SEQ ID NO:85) and DI-SLTA-1::scFva::C1::C1 (SEQ ID NO: 87) to PD-L1 positive HCC1954 cells at different concentrations of PD-L1 targeting molecule. On the Y-axis is plotted the percentage of cell viability, versus the PD-L1 targeting molecule concentration in ng/mL on the X-axis. These PD-L1 targeting molecules exhibited potent cytotoxicity to target positive cell lines. In a PD-L1 positive cell kill assay, the CD₅₀ values for DI-SLTA-1::scFva and DI-SLTA-1::scFva::C1::C1 were comparable (data not shown).

[0720] The concentration of DI-SLTA-1::scFva::C1::C1 for optimal binding and cytotoxic potency to PD-L1 expressing human cells may be determined from the empirical results shown in FIGS. 3 and 22. The cytotoxic potency of DI-SLTA-1::scFvb::C1 (SEQ ID NO:85) to PD-L1 expressing human cells may be favorable at concentrations below full receptor occupancy conditions (see FIGS. 2-3).

### V. Testing PD-L1/PD-1 Signaling Interference by PD-L1 Targeting Molecules

[0721] The PD-1/PD-L1 signaling interaction was investigated in the presence of illustrative PD-L1 targeting molecules using a PD-L1/PD-1 blockage reporter kit (Promega®, Madison, Wis., U.S.), which is based on a Jurkat NFAT-Luc reporter system activated by the release of PD-1 inhibition. Atezolizumab, a known inhibitor of the PD-L1/PD-1 interaction, was used a positive control and PBS was used as a negative control. Target cells expressing PD-L1 (provided with the kit) were incubated with proteins for 30 minutes and then co-cultured for six hours at 37° C. with Jurkat T-cells expressing PD-1 (provided with the kit) expressing an NFAT-Luc reporter under the control of a TCR. BioG10™ reagent (luciferin) was added to wells of plate and plates were read for luminescence using a luminometer according to standard procedure (Promega).

[0722] FIG. 5 shows blockade of PD-1/PD-L1 signaling caused by administration of an anti-PD-L1 monoclonal antibody (mAb), a PD-L1 targeting molecule (DI-SLTA-1-PD-L1), a DI-SLTA-1 molecule without a targeting domain (DI-DLTA-1-non target) and molecule 115695 (SEQ ID NO: 86) to PD-1 positive Jurkat T-cells expressing an NFAT-Luc reporter under the control of a T-cell receptor (TCR). The relative light units (RLU) measured from the luciferase reporter as a percentage of maximum is plotted on the Y-axis, and the PD-L1 targeting molecule concentration is plotted in ng/mL on the X-axis.

[0723] The PD-L1 signaling half-maximal effective concentration (EC₅₀) value (concentration at which blockade is 50% of positive control) or half-maximal PD-L1 signaling inhibitory concentration (IC₅₀) value of DI-SLTA-1::scFvb::C1 (SEQ ID NO:85) in this PD-1/PD-L1 Blockade assay was over 100-fold greater than the CD₅₀ value for HCC1954 cells (see FIG. 21), which suggests that potent killing of target cell killing may occur at PD-L1 targeting molecule concentrations that are not sufficient to cause significant PD-1/PD-L1 signaling blockade activity.

VI. Testing CD8+ T-Cell Epitope Delivery and MHC-Peptide Complex (pMHC is) Expression Induction Capabilities of Illustrative PD-L1 Targeting Molecules

[0724] The successful delivery of a fused CD8+ T-cell epitope from an extracellular molecule to the interior of a cell and into the MHC class I presentation pathway can be determined by detecting a specific cell surface, MHC class I molecule/epitope complex (pMHC I) on the cell surface after exogenous administration of the delivery molecule. To test whether a PD-L1 targeting molecule can deliver a fused, CD8+ T-cell epitope to the MHC class I presentation pathway of target cells, flow cytometry-based assays known to the skilled worker are employed which detect MHC Class I molecules complexed with specific epitopes.

### VII. Testing Cytotoxic T-Cell Mediated Cytolysis of Intoxicated Target Cells and Other Immune Responses Triggered by MHC Class I Presentation of T-Cell Epitopes Delivered by PD-L1 Targeting Molecules

[0725] In this Example, standard assays known in the art were used to investigate the functional consequences of target cells' MHC class I presentation of T-cell epitopes delivered by illustrative PD-L1 targeting molecules, such as, e.g., CTL-mediated target cell killing and cytokine release by CTLs.

[0726] A CTL-based cytotoxicity assay was used to assess the consequences of CD8+ T-cell epitope presentation. The assay involves tissue-cultured target cells and T-cells. PD-L1+ target cells were intoxicated with illustrative PD-L1 targeting molecules by incubating the cells (typically for 4 hours or 16 hours or more) in standard conditions, including at 37° C. and an atmosphere with 5% carbon dioxide, to allow for intoxication by the PD-L1 targeting. After incubation, the target cells were washed. Next, CTLs were added to the treated target cells and incubated to allow for the CTLs to recognize and bind any target cells displaying epitope-peptide/MHC class I complexes (pMHC Is). Then certain functional consequences of pMHC I recognition were investigated using standard methods known to the skilled worker, including epitope-presenting target cell killing by CTL-mediated cytolysis, and the release of cytokines, such as IFN-γ or interleukins by ELISA. For example, for detection of cytokine secretion, supernatant was harvested from co-culture experiments at 48 hours after treatment and human IFN-γ cytokine levels were detected using an ELISA Max kit (BioLegend, San Diego, Calif., U.S.A.) according to the manufacturer's protocol. Changes in absorbance at 450 nm were compared to a standard curve and analyzed via GraphPad Prism Software.

[0727] FIG. 4 shows the amount of human interferon gamma (IFN-γ) secretion induced 48 hours after exogenous administration of illustrative PD-L1 targeting molecules DI-SLTA-1::scFvb (SEQ ID NO:84), DI-SLTA-1::scFvb::C1 (SEQ ID NO:85), DI-SLTA-1::scFva (SEQ ID NO:86), and DI-SLTA-1::scFva::C1::C1 (SEQ ID NO: 87) to PD-L1 positive/HLA:A02 positive MDA-MB-231 cells in the presence of donor cytotoxic T-cells. The label “No PD-L1 targeting molecule” refers to a sample to which no PD-L1 targeting molecule was administered.

[0728] The data in FIG. 4 shows that the CD8+ T-cell epitope-peptide cargo must be present to elicit significant human interferon gamma secretion in this assay. DI-SLTA-1::scFvb::C1 (SEQ ID NO:85) and DI-SLTA-1::scFva::C1::C1 (SEQ ID NO: 87) showed similar abilities to deliver a CD8+ T-cell epitope delivery-dependent response (IFN-γ secretion) in co-culture models with CMV antigen specific-CTLs and HLA:A2 positive/PD-L1 positive target cells (MDA-MB-231 cells). Similar results were also observed for DI-SLTA-1::scFva::C1::C1 (SEQ ID NO: 87, 115765).

[0729] To test for T-cell enrichment, PBMCs from HLA-typed donors were isolated from Leukopaks (All Cells, Alameda, Calif., U.S.) by density centrifugation. Donor 1 (D1) was homozygous for the HLA:A2 allele, and donor 2 (D2) was heterozygous at the HLA-A locus, carrying only one copy of the HLA:A2 allele. For CMV-CTL enrichment, cells were treated with C1 peptide (SEQ ID NO:77) (CMV-pp65 for HLA:A02) in the presence of a cytokine cocktail. Cells were expanded in vitro for one to two weeks, and CMV-CTL expansion was measured by flow cytometry using fluorophore conjugated TCR-binding, MHC-I pentamers (ProImmune, Inc., Sarasota, Fla., U.S.).

[0730] Co-culture assays were also performed. Briefly, PD-L1 positive cells were plated at 10,000 to 20,000 cells per well in 96-well plates (˜40% confluence) and incubated with illustrative PD-L1 targeting molecules as described above. After 4 hours or 24 hours, the PD-L1 targeting molecule was washed away and then cells were co-cultured with T-cells or just cell-culture medium. PD-L1 positive/HLA:A2 positive MDA-MB-231 cells that express a fluorescent tag (Essen Bioscience, Inc. Ann Arbor, Mich., U.S.A.) or MCF-7 cells were used as targets in IncuCyte assays. Cell viability over time was measured using a IncuCyte-S3-Live cell imager (Essen Bioscience), and phase and fluorescent images were captured every four to six hours. Percent viability was measured by fluorescent cell counts via IncuCyte-S3 software package (Essen Bioscience). Viability data was plotted as total fluorescent cell counts and normalized to time zero. CD₅₀ values were calculated by non-linear regression and plotted using GraphPad® Prism® Software.

[0731] FIG. 6 and FIG. 15 show dose-dependent cytotoxicities of illustrative PD-L1 targeting molecules DI-SLTA-1::scFva (SEQ ID NO:86) (no CMV-CTL) and DI-SLTA-1::scFva::C1::C1 (SEQ ID NO: 87) to PD-L1 positive/HLA:A02 negative HCC1954 cells in the presence of donor cytotoxic T-cells after acute exposure (4 hours) to the PD-L1 targeting molecule. On the Y-axis is plotted the percentage of cell viability versus the PD-L1 targeting molecule concentration in ng/mL on the X-axis. Certain results from this experiment are reported in Table 5.

TABLE 5
CTL-dependent Cytotoxicity Induced by Illustrative
PD-L1 Targeting Molecules Occurs with HLA:A02
Homozygous or Heterozygous Donor CMV-CTLs

| PD-L1 targeting molecule - | cytokine secretion |
|---|---|
| CMV-CTL donor cell type | (fold over control) |
| DI-SLTA-1::scFvb::C1 + Donor 1 cells | 4.8 |
| (homozygous) | |
| DI-SLTA-1::scFva::C1::C1 + Donor 2 | 7.5 |
| cells (heterozygous) | |

[0732] The results in FIG. 6 and FIG. 15 show that CD8+ T-cell epitope delivery and induction of T-cell engagement occurs within 4 hours, which is consistent with PD-L1 targeting molecule delivering of antigen and mobilizaztion of surface peptide/complex to the surface of cells to be available as soon as CTLs are added in the assay. Thus, this mechanism of action results in the initiation of a mechanism of cell kill that may result in increased target cell cytoxicity when combined with the slower acting cell-kill mechanism of ribosomal inhibition. The cytotoxicity and CTL engagement results shown in FIG. 6, FIG. 15, and Table 5 showed no significant difference between donor 1 (D1) and donor 2 (D2). Thus, although the T-cell engagement mechanism of cell kill may be restricted to HLA:A2 matched donor CMV-CTLs, this cell-kill mechanism (MOA-2) can be achieved with either full or heterozygous haplotype matching to the CD8+ T-cell antigen payload.

[0733] FIG. 7 shows the cytotoxicity of illustrative PD-L1 targeting molecules DI-SLTA-1::scFva (SEQ ID NO:86), inactivated DI-SLTA-1::scFva (SEQ ID NO:88), DI-SLTA-1::scFva::C1::C1 (SEQ ID NO: 87), and inactivated DI-SLTA-1::scFva::C1::C1 to PD-L1 positive/HLA:A02 positive MDA-MB-231 cells in the presence of donor cytotoxic T-cells (at a ratio of 2 target cells to 1 cytotoxic T-cell (2:1 (E:T))) in a kinetic analysis. On the Y-axis is plotted the percentage of cell viability versus the time in hours on the X-axis. In FIG. 7, the term “CMV-CTL” refers to CMV antigen specific-CTLs, such as, e.g., those CTLs having T-cell receptors (TCRs) recognizing the C1 peptide (SEQ ID NO:77).

[0734] FIG. 8 shows dose-dependent cytotoxicity of DI-SLTA-1::scFvb (SEQ ID NO:84), ER-DI-SLTA-1::scFvb, DI-SLTA-1::scFvb::C1 (SEQ ID NO:85), and ER-DI-SLTA-1::scFvb::C1 to PD-L1 positive MDA-MB-231 cells. On the Y-axis is plotted the percentage of cell viability versus the PD-L1 targeting molecule concentration in ng/mL on the X-axis.

[0735] FIG. 9 shows the cytotoxicity of illustrative PD-L1 targeting molecules DI-SLTA-1::scFvb (SEQ ID NO:84), ER-DI-SLTA-1::scFvb, DI-SLTA-1::scFvb::C1 (SEQ ID NO:85), and ER-DI-SLTA-1::scFvb::C1 to PD-L1 positive/HLA:A02 positive MDA-MB-231 cells in the presence of donor cytotoxic T-cells. The percentage of cell viability is shown on the Y-axis with controls on the left. In FIG. 9, the term “cntrl” refers to control experiments performed in the absence of PD-L1 targeting molecule.

[0736] FIG. 10 shows the amount of human interferon gamma (IFN-γ) secretion induced 48 hours after exogenous administration of an illustrative PD-L1 targeting molecule to PD-L1 positive/HLA:A02 positive MDA-MB-231 cells in the presence of donor cytotoxic T-cells. The data shown is for the illustrative PD-L1 targeting molecules DI-SLTA-1::scFvb (SEQ ID NO:84), ER-DI-SLTA-1::scFvb, DI-SLTA-1::scFvb::C1 (SEQ ID NO:85), and ER-DI-SLTA-1::scFvb::C1.

[0737] FIG. 11B shows the cytotoxicity of illustrative PD-L1 targeting molecules to PD-L1 positive/HLA:A02 positive MDA-MB-231 cells after acute (4 hour, followed by washout) or sustained (24 hour) exposure to the PD-L1 targeting molecule, according to the protocol shown in FIG. 11A). The percentage of cell viability is shown on the Y-axis. The data shown is for the illustrative PD-L1 targeting molecules DI-SLTA-1::scFva (SEQ ID NO:86), ER-DI-SLTA-1::scFva::C1::C1, inactivated DI-SLTA-1::scFva (SEQ ID NO:88), and inactivated DI-SLTA-1::scFva::C1::C1.

[0738] FIG. 12 shows the cytotoxicity of illustrative PD-L1 targeting molecules to PD-L1 positive/HLA:A02 positive MDA-MB-231 cells after acute or sustained exposure to the PD-L1 targeting molecule. The percentage of cell viability is shown on the Y-axis. The data shown is for the illustrative PD-L1 targeting molecules DI-SLTA-1::scFvb (SEQ ID NO:84), DI-SLTA-1::scFvb::C1 (SEQ ID NO:85), ER-DI-SLTA-1::scFvb, and ER-DI-SLTA-1::scFvb::C1.

[0739] Taken together, the data in FIGS. 11B and 12 shows that delivery of the CD8+ T-cell epitope and presentation thereof on the surface of the cell occurs under acute and sustained exposure. The data shown in FIG. 16 shows that the tested PD-L1 targeting molecules act quickly to induce cell death and T cell activation under both short or long exposure, with longer exposure resulting in more activity (i.e., cell death and T-cell activation).

[0740] The cytotoxicity of illustrative PD-L1 targeting molecules to PD-L1 positive cells (target cells) in the presence of cytotoxic lymphocytes is affected by the MHC class I molecule expressed by the PD-L1 positive target cell and the TCR expressed by the cytotoxic lymphocyte in the co-culture. Target cells expressing HLA:A2 are killed more readily by C1 epitope carrying PD-L1 targeting molecules. Similarly, PD-L1 negative cells expressing HLA:A2 (MCF-7 cells) are not killed in any significant amounts.

[0741] The inactivated PD-L1 targeting molecules lacking Shiga toxin effector catalytic activity were still able to elicit potent CTL-mediated cytotoxicity via intercellular CTL engagement (indirect killing mechanism of action based on delivered epitope presentation) as a result of PD-L1 targeting molecules delivering the C1 epitope-peptide to the target cell's MHC class I presentation pathway. The ER-DI-SLTA-1 component was designed to prevent the scaffold from readily escaping the endoplasmic reticulum. Constructs comprising such a Shiga toxin effector polypeptide can still be cytotoxic due to the presence of the CD8+ T-cell epitope cargo despite their predicted intracellular localization patterns preventing contact with ribosomes. The ER-DI-SLTA-1 component exhibits wild-type levels of catalytic activity in an in vitro translation inhibition assay.

[0742] FIGS. 13A and 13B show that an illustrative PD-L1 targeting molecules exhibited binding to human PD-L1 that was robust and specific using a membrane proteome array, which comprised 5,300 different human proteins known to be expressed on the cell surface of HEK-293T. Only human PD-L1 (CD274) was identified as a high affinity binder among the 5,300 proteins as a bound target for two illustrative PD-L1 targeting molecules comprising the same scFv (FIG. 13). FIG. 13A shows that DI-SLTA-1::scFva::C1 (SEQ ID NO:87) binding to human PD-L1 was robust and specific. FIG. 13B shows that DI-SLTA-1::scFva (SEQ ID NO:86) binding to human PD-L1 was robust and specific.

[0743] FIG. 14 shows the results of a T-cell engagement and stimulation assay experiment as described above and with other results from the experiment shown in FIG. 4. The top of FIG. 14 shows the relative cell-surface expression levels of PD-L1 and the MHC class I allele HLA:A2 for two tumor cell lines: MCF-7 and MDA-MB-231. The bottom of FIG. 14 shows the amount of human IFN-γ secretion induced after exogenous administration of illustrative PD-L1 targeting molecules to PD-L1 positive/HLA:A02 positive MDA-MB-231 cells or PD-L1 negative MCF-7 cells in the presence of donor cytotoxic T-cells which can recognize the epitope-peptide C1 (SEQ ID NO:77) complexed with MHC class I molecules. The lower graph shows DI-SLTA-1::scFva::C1::C1 administration to PD-L1 positive MDA-MB-231 cells in co-culture with CMV-antigen specific cytotoxic T lymphocytes (CTL) at a ratio of 2 target cells to 1 cytotoxic T-cell (“2:1 (E:T) CMV-CTL”) resulted in human interferon gamma (IFN-γ) secretion; however, administration of DI-SLTA-1::scFva::C1::C1 to PD-L1 negative MCF-7 cells did not. The label “No ETB” refers to no PD-L1 targeting molecule administration to that sample. The data in FIG. 14 shows that the CD8+ T-cell epitope-peptide cargo must be present to elicit significant human interferon gamma secretion in this assay as DI-SLTA-1::scFva (SEQ ID NO:86) failed to induce any significant amount of interferon gamma (IFN-γ) secretion. The data in FIG. 14 shows that the CD8+ T-cell epitope-peptide cargo must be present and target cells must express PD-L1 for administration of a PD-L1 targeting molecule to elicit significant human interferon gamma secretion in this assay. In FIG. 14, “SLTA-scFv2” refers to DI-SLTA-1::scFva (SEQ ID NO:86), and “SLTA-scFv2-CMV” refers to DI-SLTA-1::scFva::C1::C1. In FIG. 14, HLA:A2-CMVpp65 refers to T-cell epitope-peptide C1 (SEQ ID NO:77).

[0744] FIG. 15 shows PD-L1 targeting molecule treatment induces CTL-mediated cytotoxicity and human interferon gamma (IFN-γ) secretion in co-cultures of PD-L1 positive tumor cells (MDA-MB231) with antigen-specific CTLs at a ratio of 2 target cells to 1 CTL (“2:1 CMV-CTL”). In FIG. 15, “SLTA-scFv2” refers to DI-SLTA-1::scFva (SEQ ID NO:86), “SLTA-scFv2-CMV” refers to DI-SLTA-1::scFva::C1::C1, and “inactive SLTA-scFv2” refers to DI-SLTA-1::scFva (SEQ ID NO:86), and “inactive SLTA-scFv2-CMV” refers to “inactivated DI-SLTA-1::scFva::C1::C1”. The bottom right portion of FIG. 15 shows the induction of human interferon gamma (IFN-γ) secretion in co-cultures of PD-L1 positive tumor cells with antigen-specific CTLs at a ratio of 2 target cells to 1 CTL (“2:1 CMV-CTL”). Both DI-SLTA-1::scFva::C1::C1 and “inactivated DI-SLTA-1::scFva::C1::C1” were capable of inducing of human interferon gamma (IFN-γ) secretion, whereas samples lacking PD-L1 targeting molecule or PD-L1 targeting molecule comprising a C1 epitope did not induce any significant amount of IFN-γ secretion. Notably, even though the inactivated construct was not able to inactivate ribosomes, it was still able too deliver the CD8+ T-cell epitope. The data in FIG. 15 reveals the cooperative nature of these two mechanisms of action.

[0745] FIG. 16 shows the cytotoxicity of illustrative PD-L1 targeting molecules to PD-L1 positive/HLA:A02 positive MDA-MB-231 cells after acute (4 hours) or sustained (24 hours) exposure to the PD-L1 targeting molecule. The percentage of cell viability as compared to a negative control is shown on the Y-axis. The data shown is for the illustrative PD-L1 targeting molecules DI-SLTA-1::scFva (SEQ ID NO:86) and DI-SLTA-1::scFva::C1::C1 (SEQ ID NO: 87). In FIG. 16, the abbreviation “hrs” denotes “hours” and the abbreviation “Abs” denotes absorbance. In FIG. 16, “SLTA::scFv2” refers to DI-SLTA-1::scFva (SEQ ID NO:86), and “SLTA-scFv2-CMV” refers to DI-SLTA-1::scFva::C1::C1 (SEQ ID NO: 87). In FIG. 16, HLA:A2-CMVpp65 refers to T-cell epitope-peptide C1 (SEQ ID NO:77). Antigen delivery induced, T-cell mediated cytotoxicity occurs rapidly enough to observe during both acute and sustained exposure despite the presence of direct target cell kill via protein synthesis inhibition (compare DI-SLTA-1::scFva::C1::C1 to DI-SLTA-1::scFva for either condition). The results in FIG. 16 suggest antigen delivery induced, T-cell mediated cytotoxicity occurs at kinetic rates and potencies at both acute and sustained exposure conditions which adds to the direct target cell-kill potency, which appears to have slower kinetics. Thus, the two mechanisms of action may both contribute to producing cell kill under either acute or sustained exposure conditions (see e.g. FIGS. 11A, 11B, 12, 15-16, 18-19, and 21).

[0746] FIG. 17 shows the induction of human interferon gamma (IFN-γ) secretion in co-cultures of PD-L1 positive tumor cells (which are also HLA:A2 positive) with antigen-specific CTLs (having TCRs recognizing the C1 peptide (SEQ ID NO:77)) after 48 hours with samples subjected to either an acute (4 hours) or sustained (24 hours) exposure to a PD-L1 targeting molecule. Both DI-SLTA-1::scFvb::C1 (SEQ ID NO:85) and DI-SLTA-1::scFva::C1::C1 (SEQ ID NO: 87) were capable of inducing of human interferon gamma (IFN-γ) secretion by means of either an acute or sustained exposure. In FIG. 17, the term “SLTA-scFv1-CMV” refers to DI-SLTA-1::scFvb::C1, and the term “SLTA-scFv2-CMV” refers to DI-SLTA-1::scFva::C1::C1. In FIG. 17, HLA:A2-CMV-pp65 refers to samples treated only with the T-cell epitope-peptide C1 (SEQ ID NO:77).

[0747] FIG. 18 visually depicts how two mechanisms of action for cell killing may be performed by a single PD-L1 targeting molecule. Mechanism of action #1 (MOA-1) is based on the catalytic damaging of PD-L1 expressing cell ribosomes and requires cytosolic localization of a Shiga toxin A Subunit A1 fragment component. Mechanism of action #2 (MOA-2) is based on the delivery of a CD8+ T-cell epitope-peptide cargo to the MHC class I presentation pathway. MOA-1 occurs with or without the presence of the epitope-peptide cargo. The presence of an epitope-peptide cargo required for MOA-2 does not have a significant impact on the function of MOA-1. MOA-2 involves the cleavage of the epitope-peptide cargo away from the PD-L1 targeting molecule and loading of an epitope-peptide (e.g. a viral antigen) onto a MHC class I molecule in the endoplasmic reticulum to form a complex. The MHC class I molecule-epitope-peptide complex then travels from the endoplasmic reticulum throught the Golgi and to the PD-L1 expressing cell surface. On the cell-surface, the antigen-MHC class I molecule complex induces cytotoxic T lymphocyte (CTL) responses to the antigen displaying cell. In this model, both MOA-1 and MOA-2 depend on the PD-L1 targeting molecule docking with PD-L1 on the surface of a target cell, cellular internalization of the PD-L1 targeting molecule, and retrograde transport of the Shiga toxin A Subunit A1 fragment component and the CD8+ T-cell epitope from the endosome to reach the endoplasmic reticulum.

[0748] FIG. 19 summarizes the results described throughout Example 1. There are at least two different mechanisms of action that may be provided by a PD-L1 targeting molecule, described as MOA-1 and MOA-2. The empirical data in Example 1 demonstrates that a single PD-L1 targeting molecule can exhibit MOA2 activity concomitantly with MOA1 activity. The data also shows that MOA2 activity may be achieved in the absence of MOA1 activity, such as, e.g., by using PD-L1 targeting molecules having Shiga toxin A Subunit effector polypeptide components which are catalytically inactive and/or truncated at their carboxy-terminus, and are thereby predicted to result in retention in the endoplasmic reticulum instead of retranslocating to the cytosol (see e.g. La Pointe 2005). There are at least four different PD-L1 targeting molecule formats described: (A) active and capable of performing MOA-1 but not MOA-2, (B) active with both MOA-1 and MOA-2, (C) active with MOA-2 but not MOA-1 due to enzymatic inactivation via point mutation, and (D) active with MOA-2 but not MOA-1 due to endoplasmic reticulum localization (i.e. cytosolic localization is blocked) caused by a carboxy-terminal truncation of the A1 fragment of the Shiga toxin A Subunit effector polypeptide. For the PD-L1 targeting molecule format shown in (D), the Shiga toxin A Subunit effector polypeptide of the PD-L1 targeting molecule still retains catatlyic activity in vitro to depurinate ribosomes and inhibit protein synthesis but this catalytic activity does not occur in vivo because the molecule's subcellular localization (retention in the lumen of the endoplasmic reticulum) prevents contact with ribosomes. In FIG. 19, the abbreviation “AST” denotes “antigen seeding technology”, which refers to the ability to create immuno-stimulation in a local area of a target cell(s) within an organism via delivery of a CD8+ T-cell epitope for MHC class I presentation, such as, e.g., delivery of T-cell epitope-peptide C1 (SEQ ID NO:77) by a PD-L1 targeting molecule, resulting in cytokine secretion and/or cytotoxic T lymphocyte intercellular engagement and target cell-killing.

[0749] FIG. 20 describes the rationale behind the choice of CD8+ T-cell epitope cargos for delivery by a PD-L1 targeting molecule. The C1 peptide (SEQ ID NO:77) from the human cytomegalovirus (CMV) pp65 protein is recognized by HLA:A02 with high affinity. HLA:A02 is the most prevalent HLA allele in North American patient populations. About 60 to 80 percent of the adult population is CMV positive, meaning these people carry memory T-cells specific to pp65 antigens and these immune cells are chronically functioning to contain residual CMV in fashion that may be resistant to T-cell dysfunction, such as anergy. Antigen seeding via antigen cargo delivery to the MHC class I presentation pathway may function to redict endogenous T-cells specific to CMV antigen to tumor cells by altering the immunophenotype of the tumor site thereby mimicking an infected tissue state. The antigen seeding technology approach differs from CAR-T therapies and may offers specific advantages over CAR-T therapies, including no reqirement for exogenous engeineering, operating via natural synaptic interactions between the patient's endogenous T-cells and tumor cells, and no requirement for anti-tumor cytotoxic lymphocyte involvement.

[0750] FIG. 21 summarizes the results for DI-SLTA-1::scFva::C1 (SEQ ID NO:87) and DI-SLTA-1::scFva::C1::C1 descrived above in Example 1 and in comparison to the approved anti-PD-L1 antibody therapeutic atezolizumab. In FIG. 21, the term EC₅₀ means the half-maximal effective concentration, the term IC₅₀ means the half-maximal inhibitory concentration, and the abbreviation “NT” denotes “not tested.” In FIG. 21, the phrase “fold over parental” refers to the measured value divided by the measured value for the same PD-L1 targeting molecule scaffold lacking a carboxy-terminal viral antigen, e.g. C1 or C1::C1. As noted above, the abbreviation “AST” denotes “antigen seeding technology”, which refers to the ability to create immuno-stimulation in a local area of a target cell(s) within an organism via delivery of a CD8+ T-cell epitope for MEW class I presentation, such as, e.g., delivery of T-cell epitope-peptide C1 (SEQ ID NO:77) by a PD-L1 targeting molecule resulting in cytokine secretion and/or cytotoxic T lymphocyte intercellular engagement and target cell-killing.

[0751] The PD-L1 binding molecules of SEQ ID NO: 86 (SI-SLTA::scFvca, 115695) and 87 (DI-SLTA-1::scFva::C1::C1, 115765) did not display signs of direct clearance of immune subsets, immune subset expansion, or tissue infiltration to promote irAE development in in vivo studies with non-human primates. Briefly, the PD-L1 binding molecules were administered to non-human primates every 3 days for a period of 2 weeks. The DI-SLTA-1::scFva::C1::C1 was administered at a dose of 25, 150, or 450 ug/kg, and the DI-SLT-A::scFva was administered at a dose of NHPs at 50, 150, or 450 μg/kg. The data are summarized in FIG. 24. In vivo depletion of monocytes either of these molecules was not observed. Additionally, none of the following were observed: (a) increases in lymphocyte populations, (ii) cytokine profiles associated with T-cell activation and/or immune checkpoint inhibitor treatment, (iii) infiltration of T-lymphocytes into cardiac tissue, (iv) myocarditis.

### VIII. Comparison of the Activities of PD-L1 Binding Molecules

[0752] An additional study was to compare the ability of various PD-L1 binding molecules to induce an antigen-specific T-lymphocyte (AST) response in target cells, as a function of time target cells are exposed to the molecules.

[0753] PD-L1 binding molecules comprising distinct binding domains were compared against each other in a co-culture cell viability assay. Briefly, PD-L1 binding molecules were incubated with PD-L1 positive and HLA:A*02 positive target cells at high density for either 4 hours or 24 hours (See Table 6). The binding molecules were then washed off. Each PD-L1 binding molecule tested comprised a peptide antigen (NLVPMVATV, SEQ ID NO: 77) for delivery to the target cells. Subsequently, cytotoxic T lymphoctes (CTLs) restricted to the peptide antigen delivered by the binding molecules were co-cultured with the pre-trated target cells, at an effector cell to target cell ratio of 1:1. After 48 hours of co-culture, supernatants were harvested and used for detection of IFN-γ as a readout for CTL activation by ELISA. Viability was also measured at 60-72 hours using an IncuCtye S3 (Sartorius) system, as determined by confluency of the monolayer. PD-L1 binding molecules were compared for their ability to promote direct cell kill or mediate T cell activation (i.e., IFN-γ secretion) after acute incubation and washout (4 h) or sustained incubation with target (24 h).

TABLE 6
PD-L1 and HLA:A*02 Positive Target Cells and HLA:A*02
NLVPMVATV (SEQ ID NO: 77) Restricted Effector Cells

| Donor ID or | | |
|---|---|---|
| Cell Line | Cell Type | Characteristics |
| MDA-MB-231 | Epithelial; | PD-L1 + and HLA:A*02 + |
| | adenocarcinoma | 10,000 cells/well in 40 μL media |
| | | in a 96-well plate |
| HCMV-CTL | Primary T Cell | HLA:A*02 NLVPMVATV restricted |
| | | Used at 1:1 Effector to target ratio |

[0754] Results are shown in FIGS. 26A and 26B and summarized below in Table 7. The molecules 115749 and 114895 are PD-L1 binding molecules having different binding regions and are described in PCT/US2020/051589 which is incorporated by reference herein in its entirety. In FIGS. 26A and 26B, data for the molecules are listed in the following order from left to right: 115749, 115765, 114895. The PD-L1 binding molecules tested demonstrated T cell dependent activation and cell kill. The potency of T cell activation, as measured by IFN-γ secretion as well as the cell-kill response elicited in the presence of CTLs was increased overall for 24 hour ‘sustained’ incubation experiments as compared to 4 hour ‘acute’ PD-L1 binding molecule incubation experiments (Figure. 26A).

TABLE 7
Co-Culture Assay Results: MDA-MB-231 and HCMV-CTL Primary
Human T Cells Treated with PD-L1 Binding Molecule
PD-L1 positive human breast tumor cell line (MDA-MB-231)

| | T-cell activation | | T-cell cytotoxicity | |
|---|---|---|---|---|
| | (IFN-γ, pg/mL) | | (Max % kill) | |
| PD-L1 binding | Acute | Sustained | Acute | Sustained |
| molecule | (4 h) | (24 h) | (4 h) | (24 h) |
| 115765 | 15 | 46 | 96 | 48 |

PD-L1 negative cells (MCF7)

| | |
|---|---|
| T-cell activation | T-cell cytotoxicity |
| (IFN-γ, pg/mL) | (CD50 ng/mL) |

| PD-L1 binding | Acute | Sustained | Acute | Sustained |
|---|---|---|---|---|
| molecule | (4 h) | (24 h) | (4 h) | (24 h) |
| 115765 | >10,000 | >10,000 | >10,000 | 1338 |

[0755] The ability of the PD-L1 binding molecules to specifically deplete immune cells was also tested. The goal of these studies was to determine whether these molecules display activities that correlate to monocyte depletion and the development of immune-related adverse events (irAE) in non-human primates (NHPs) that were not observed with other PD-L1 binding molecules.

[0756] PD-L1 binding molecules were incubated with either (i) primary human monocytes (IC) treated with IFN-γ (100 IU/mL) to induce PD-L1 expression, (ii) HCC1954 tumor cells, which express high levels of PD-L1, or (iii) MCF7 tumor cells, which do not express PD-L1 (See Table 8). The PD-L1 binding molecules were added to cells using a dose series, with the final PD-L1 binding molecule concentration ranging from 0.631-20,000 ng/mL (6- or 8-fold dilutions) and left in culture throughout the duration of the study. On Day 5 of the assay, cells were evaluated for viability using a standard Cell Titer Glo assay, as described above.

TABLE 8
Target cells

| Donor ID or | | Cell Number for Cytotoxicity |
|---|---|---|
| Cell Line | Cell Type | Assay |
| Donor 1 | CD14 + Monocyte | 5,000 cells/well in 20 μL media |
| CC00152 | | in a 384-well plate |
| Donor 1 M6206 | CD14 + Monocyte | 5,000 cells/well in 20 μL media |
| | | in a 384-well plate |
| Donor 3 M6541 | CD14 + Monocyte | 5,000 cells/well in 20 μL media |
| | | in a 384-well plate |
| Donor 4 M7488 | CD14 + Monocyte | 5,000 cells/well in 20 μL media |
| | | in a 384-well plate |
| HCC1954 | Epithelial; ductal | 1,000 cells/well in 20 μL media |
| | carcinoma | in a 384-well plate |
| MCF7 | Epithelial; | 1,000 cells/well in 20 μL media |
| | adenocarcinoma | in a 384-well plate |

[0757] Results are shown in FIG. 26A, 26B and summarized in Table 9 below. Molecules 115765 and 114895 elicited a dose-dependent depletion of a representative IC population of primary monocytes across cells from four individual donors. Similar responses were observed with the PD-L1 binding molecules 114963, 114964, and 115695 which lack a C-terminal CD8+ T-cell epitope-peptide cargo. 114962 which lacks a C-terminal peptide-antigen cargo failed to target monocytes for cell depletion. A negative control, DI-SLTA alone did not show direct activity on monocytes tested in the assay.

[0758] In contrast to differential activity of different PD-L1 binding molecules toward monocytes, PD-L1 binding molecules showed similar potency toward the TC line, HCC1954, which expresses the PD-L1 target, and similar lack of activity towared the PD-L1 negative control line MCF7.

TABLE 9
Co-Culture Assay Results: HCC1954 (TC) and Primary Human T
Cells (IC) Treated with PD-L1 Binding Molecule
PD-L1 positive human breast tumor cell line (HCC1954)

| | | |
|---|---|---|
| | Cytotoxicity | Cytotoxicity |
| PD-L1 binding | (CD50 ng/mL) | (Max % kill) |

| molecule | TC | IC | TC | IC |
|---|---|---|---|---|
| 115765 | 4.7 | >20,000 | 99 | 27 |
| 115695 | 29 | 5969 | 99 | 34 |

[0759] All PD-L1 binding molecules tested elicited potent cell kill of the TC control line (Max response >90%) and displayed potencies at less than 10 ng/mL with the exception of 114962, 115749, and 114895 (>35 ng/mL).

### VIII. Quantifying Cytotoxic T-Cell Mediated Cytolysis of Intoxicated Target Cells and Other Immune Responses Triggered by MHC Class I Presentation of T-Cell Epitopes Delivered by PD-L1 Targeting Molecules

[0760] The activation of CTLs by target cells displaying epitope-peptide/MHC class I complexes (pMHC Is) is quantified using commercially available CTL response assays, e.g. CytoTox96® non-radioactive assays (Promega, Madison, Wis., U.S.), Granzyme B ELISpot assays (Mabtech, Inc., Cincinnati, Ohio, U.S.), caspase activity assays, and LAMP-1 translocation flow cytometric assays. To specifically monitor CTL-mediated killing of target cells, carboxyfluorescein succinimidyl ester (CFSE) is used to target-cells for in vitro and in vivo investigation as described in the art (see e.g. Durward M et al., J Vis Exp 45 pii 2250 (2010)).

[0761] In summary, the data presented in Example 1 demonstrates that Shiga toxin effector functions, particularly subcellular routing, can be retained at high levels despite the presence of a fused epitope-peptide on the carboxy-terminus and the presence of numerous mutations in the Shiga toxin derived component providing de-immunization and protease-cleavage resistance. Furthermore, several PD-L1 targeting molecules exhibit a level of epitope cargo delivery sufficient to produce a level of epitope-MHC class I presentation to stimulate intercellular, T-cell engagement with epitope-cargo-presenting cells.

### Example 2. PD-L1 Targeting Molecules that Bind to PD-L1 and Comprise a Shiga Toxin A Subunit Scaffold

[0762] In this example, a binding region which binds an extracellular part of a PD-L1 target biomolecule comprising a heavy chain variable region comprising three CDRs, each comprising or consisting essentially of an amino acid sequence show in any one of SEQ ID NO:22, SEQ ID NO:23, SEQ ID NO:24, SEQ ID NO:36, and SEQ ID NO:37 and a light chain variable region comprising three CDRs, having at least 95%, 96%, 97%, 98%, or 99% identity to SEQ ID NO:19, SEQ ID NO:20, and SEQ ID NO:21 is fused to a Shiga toxin effector polypeptide (such as, e.g., any one of SEQ ID NOs: 1-18, 41-69, and 261-284). The Shiga toxin effector region is derived from the A subunit of a Shiga toxin or Shiga-like toxin (e.g. any one of SEQ ID NOs: 1-18), optionally such that it comprises a combination of sub-regions described herein to provide two or more of the following: 1) de-immunization, 2) protease-cleavage resistance, and/or 3) an embedded or inserted, heterologous, T-cell epitope (such as e.g., a Shiga toxin effector polypeptide described in any one of WO 2014/164680, WO 2014/164693, WO 2015/138435, WO 2015/138452, WO 2015/113005, WO 2015/113007, WO 2015/191764, WO 2016/196344, WO 2017/019623, WO 2018/106895, and WO 2018/140427).

[0763] The resulting fusion protein is produced and purified as a single-chain polypeptide or multimer, which is optionally multivalent (i.e. has two or more PD-L1 binding regions). The illustrative proteins of this example are optionally created with a carboxy-terminal KDEL-type signal motif using techniques known in the art and optionally linked to an additional exogenous material, such as, a CD8+ T-cell epitope-peptide cargo and/or detection promoting agent(s). The illustrative proteins of this example are tested as described in the previous examples using cells expressing the appropriate PD-L1 molecule. The illustrative PD-L1 targeting fusion proteins of this example may be used, e.g., to kill PD-L1 expressing cells, to label subcellular compartments of target cells and to diagnose and treat diseases, conditions, and/or disorders, such as, e.g. various cancers and tumors.

### NUMBERED EMBODIMENTS

[0764] Notwithstanding the appended claims, the following numbered embodiments are set forth herein:

1. A PD-L1 binding molecule comprising: A) a Shiga toxin A subunit effector polypeptide; and B) a binding region capable of specifically binding an extracellular part of PD-L1, wherein the binding region comprises (a) a light chain variable region comprising: (i) a CDR1 comprising the amino acid sequence TGTSSDVGSYNRVS (SEQ ID NO:19), (ii) a CDR2 comprising the amino acid sequence EVSNRPS (SEQ ID NO:20), and (iii) a CDR3 comprising the amino acid sequence SSHTTSGTYV (SEQ ID NO:21); and (b) a heavy chain variable region comprising: (i) a CDR1 comprising the amino acid sequence SYAIS (SEQ ID NO:22), (ii) a CDR2 comprising the amino acid sequence GIIPIFGTANYAQKFQG (SEQ ID NO:23), and (iii) a CDR3 comprising the amino acid sequence DQGYAHAFDI (SEQ ID NO:24).
2. The PD-L1 binding molecule of embodiment 1, wherein the Shiga toxin A subunit effector polypeptide comprises a proteinaceous linker that links the light chain variable region and the heavy chain variable region.
3. The PD-L1 binding molecule of embodiment 2, wherein the linker is about 3 to about 50 amino acids in length.
4. The PD-L1 binding molecule of any one of embodiments 1-3, wherein the binding region is an scFv.
5. The PD-L1 binding molecule of any on of embodiments 1-4, wherein the light chain variable region comprises the sequence of any one of SEQ ID NO: 25 or 27, or a sequence at least 90% identical thereto.
6. The PD-L1 binding molecule of any one of embodiments 1-5, wherein the heavy chain variable region comprises the sequence of SEQ ID NO: 26, or a sequence at least 90% identical thereto.
7. The PD-L1 binding molecule of any one of embodiment 1, wherein the binding region comprises a sequence of any one of SEQ ID NO: 28-35 or 38-40, or a sequence at least 90% identical thereto.
8. The PD-L1 binding molecule of embodiment 1, wherein the binding region comprises SEQ ID NO: 38, or a sequence at least 90% identical thereto.
9. The PD-L1 binding molecule of any one of embodiments 1-8, wherein the molecule comprises at least one CD8+ T-cell epitope.
10. The PD-L1 binding molecule of embodiment 9, wherein the at least one CD8+ T-cell epitope is located C-terminal to the binding region.
11. The PD-L1 binding molecule of any one of embodiments 9-10, wherein the CD8+ T-cell epitope comprises the sequence of SEQ ID NO: 77.
12. The PD-L1 binding molecule of any one of embodiments 9-11, wherein the molecule comprises at least two CD8+ T-cell epitopes.
13. The PD-L1 binding molecule of embodiment 12, wherein the at least two CD8+ T-cell epitopes are different.
14. The PD-L1 binding molecule of embodiment 12, wherein the at least two CD8+ T-cell epitopes are the same.
15. The PD-L1 binding molecule of any one of embodiments 1-14, wherein the Shiga toxin A subunit effector polypeptide has at least 95% amino acid sequence identity to a wild-type Shiga toxin A Subunit amino acid sequence selected from: amino acid residues 75 to 251 of any one of SEQ ID NOs: 1-18, amino acid residues 1 to 241 of any one of SEQ ID NOs: 1-18, amino acid residues 1 to 251 of any one of SEQ ID NOs: 1-18, and amino acid residues 1 to 261 of any one of SEQ ID NOs: 1-18.
16. The PD-L1 binding molecule of any one of embodiments 1-14, wherein the Shiga toxin A subunit effector polypeptide comprises the sequence of any one of SEQ ID NO: 1-18, 41-69, 259, or 261-284.
17. The PD-L1 binding molecule of any one of embodiments 1-14, wherein the Shiga toxin A subunit effector polypeptide comprises the sequence of SEQ ID NO: 41.
18. The PD-L1 binding molecule of any one of embodiments 1-17, wherein the Shiga toxin A subunit effector polypeptide comprises a disrupted furin-cleavage site.
19. The PD-L1 binding molecule of any one of embodiments 1-18, wherein the Shiga toxin A subunit effector polypeptide and binding region are fused, forming a continuous polypeptide.
20. The PD-L1 binding molecule of embodiment 19, wherein the single continuous polypeptide comprises, from N-terminus to C-terminus, the Shiga toxin A subunit effector polypeptide and the binding region.
21. The PD-L1 binding molecule of embodiment ane of embodiments 9-11, wherein the Shiga toxin A subunit effector polypeptide and the binding reion are fused, forming a continuous polypeptide, and wherein the single continuous polypeptide comprises, from N-terminus to C-terminus, the Shiga toxin A subunit effector polypeptide, the binding region, and the heterologous CD8+ T-cell epitope.
22. The PD-L1 binding molecule of embodiment 1, wherein the molecule comprises the amino acid sequence of any one of SEQ ID NOs: 84-110, 166, or 188-256.
23. The PD-L1 binding molecule of embodiment 1, wherein the molecule comprises the amino acid sequence of SEQ ID NO: 86 or 87.
24. A pharmaceutical composition comprising the PD-L1 binding molecule of any one of embodiments 1-23, and at least one pharmaceutically acceptable excipient or carrier.
25. A polynucleotide encoding the PD-L1 binding molecule of any one of embodiments 1-23, or a complement thereof.
26. An expression vector comprising a polynucleotide according to embodiment 25.
27. A host cell comprising a polynucleotide according to embodiment 25 or an expression vector according to embodiment 26.
28. A method of killing a PD-L1 expressing cell, the method comprising the step of contacting the cell with a PD-L1 binding molecule according to any one of embodiments 1-23 or a pharmaceutical composition according to embodiment 24.
29. A method of treating a disease, disorder, or condition involving a PD-L1 expressing cell type, the method comprising the step administering to a patient in need thereof an effective amount of a PD-L1 binding molecule according to any one of embodiments 1-23 or a pharmaceutical composition according to embodiment 24.
30. The method of embodiment 29, wherein the disease, disorder, or condition selected from: cancer, tumor, immune disorder, and microbial infection.
31. The method of embodiments 30, wherein the cancer is selected from: bone cancer, breast cancer, central/peripheral nervous system cancer, gastrointestinal cancer, germ cell cancer, glandular cancer, head-neck cancer, hematological cancer, kidney-urinary tract cancer, liver cancer, lung/pleura cancer, prostate cancer, sarcoma, skin cancer, and uterine cancer.
32. The method of embodiment 30, wherein the immune disorder is associated with a disease selected from: amyloidosis, ankylosing spondylitis, asthma, Crohn's disease, diabetes, graft rejection, graft versus host disease, Hashimoto's thyroiditis, hemolytic uremic syndrome, HIV-related disease, lupus erythmatosus, multiple sclerosis, polyarteritis, psoriasis, psoriatic arthritis, rheumatoid arthritis, scleroderma, septic shock, Sjögren's syndrome, ulcerative colitis, and vasculitis.
32. A method for purifying the PD-L1 binding molecule of any one of embodiments 1-23 from a cellular lysate comprising the PD-L1 binding molecule, the method comprising (i) contacting the cellular lysate with a bacterial protein L to create a protein L-PD-L1 binding molecule complex, and (ii) separating the protein L-PD-L1 binding molecule complex from the cellular lysate.

[0765] While some embodiments of the invention have been described by way of illustration, it will be apparent that the invention may be put into practice with many modifications, variations and adaptations, and with the use of numerous equivalents or alternative solutions that are within the scope of persons skilled in the art, without departing from the spirit of the invention or exceeding the scope of the claims.

[0766] All publications, patents, and patent applications are herein incorporated by reference in their entirety to the same extent as if each individual publication, patent or patent application was specifically and individually indicated to be incorporated by reference in its entirety. The international patent application publications WO 2014/164680, WO 2014/164693, WO 2015/138435, WO 2015/138452, WO 2015/113005, WO 2015/113007, WO 2015/191764, WO 2016/196344, WO 2017/019623, WO 2018/106895, WO 2018/140427, WO 2019/183093, WO 2020/154475, and PCT/US2020/051589 are each incorporated herein by reference in its entirety. The disclosures of U.S. patent applications 62/902,243, 62/933,197, 62/970,610, 62/644,832, 63/041,288, 63/041,291, US2015/259428, US2016/17784, and US2017/143814 are each incorporated herein by reference in its entirety. The complete disclosures of all electronically available biological sequence information from GenBank (National Center for Biotechnology Information, U.S.) for amino acid and nucleotide sequences cited herein are each incorporated herein by reference in their entirety.

The application's sequence listing, which the Patent Office published only in electronic form, follows.

SEQUENCE LISTING (289 sequences)

SEQ ID NO: 1 - protein, 293 aa, Artificial Sequence
  Shiga-like toxin 1 Subunit A (SLT-1A)
KEFTLDFSTAKTYVDSLNVIRSAIGTPLQTISSGGTSLLMIDSGSGDNLFAVDVRGIDPEEGRFNNLRLIVERNNLYVTGFVNRTNNVFYRFADFSHVTFPGTTAVTLSGDSSYTTLQRVAGISRTGMQINRHSLTTSYLDLMSHSGTSLTQSVARAMLRFVTVTAEALRFRQIQRGFRTTLDDLSGRSYVMTAEDVDLTLNWGRLSSVLPDYHGQDSVRVGRISFGSINAILGSVALILNCHHHASRVARMASDEFPSMCPADGRVRGITHNKILWDSSTLGAILMRRTISS

SEQ ID NO: 2 - protein, 293 aa, Artificial Sequence
  Shiga toxin Subunit A (StxA)
KEFTLDFSTAKTYVDSLNVIRSAIGTPLQTISSGGTSLLMIDSGTGDNLFAVDVRGIDPEEGRFNNLRLIVERNNLYVTGFVNRTNNVFYRFADFSHVTFPGTTAVTLSGDSSYTTLQRVAGISRTGMQINRHSLTTSYLDLMSHSGTSLTQSVARAMLRFVTVTAEALRFRQIQRGFRTTLDDLSGRSYVMTAEDVDLTLNWGRLSSVLPDYHGQDSVRVGRISFGSINAILGSVALILNCHHHASRVARMASDEFPSMCPADGRVRGITHNKILWDSSTLGAILMRRTISS

SEQ ID NO: 3 - protein, 297 aa, Artificial Sequence
  Shiga-like toxin 2 Subunit A (SLT-2A)
DEFTVDFSSQKSYVDSLNSIRSAISTPLGNISQGGVSVSVINHVLGGNYISLNVRGLDPYSERFNHLRLIMERNNLYVAGFINTETNIFYRFSDFSHISVPDVITVSMTTDSSYSSLQRIADLERTGMQIGRHSLVGSYLDLMEFRGRSMTRASSRAMLRFVTVIAEALRFRQIQRGFRPALSEASPLYTMTAQDVDLTLNWGRISNVLPEYRGEEGVRIGRISFNSLSAILGSVAVILNCHSTGSYSVRSVSQKQKTECQIVGDRAAIKVNNVLWEANTIAALLNRKPQDLTEPNQ

SEQ ID NO: 4 - protein, 251 aa, Artificial Sequence
  Shiga toxin subtype c Subunit A (Stx1cA)
KEFTLDFSTAKTYVDSLNVIRSAIGTPLQTISSGGTSLLMIDSGTGDNLFAVDVRGIDPEEGRFNNLRLIVERNNLYVTGFVNRTNNVFYRFADFSHVTFPGTTAVTLSGDSSYTTLQRVAGISRTGMQINRHSLTTSYLDLMSHSGTSLTQSVARAMLRFVTVTAEALRFRQIQRGFRTTLDDLSGRSYVMTAEDVDLTLNWGRLSSVLPDYHGQDSVRVGRISFGSVNAILGSVALILNCHHHASRVAR

SEQ ID NO: 5 - protein, 251 aa, Artificial Sequence
  Shiga toxin subtype d Subunit A (Stx1dA)
KEFTLDFSTAKKYVDSLNVIRSAIGTPLQTISSGGTSLLMIDSGTGDNLFAVDIMGLEPEEERFNNLRLIVERNNLYVTGFVNRTNNVFYRFADFSHVTFPGTRAVTLSGDSSYTTLQRVAGISRTGMQINRHSLTTSYLDLMSYSGTSLTQSVARAMLRFVTVTAEALRFRQIQRGFRTTLDDLSGRSYVMTAEDVDLTLNWGRLSSILPDYHGQDSVRVGRISFGSINAILGSVALILNCHHHASRVAR

SEQ ID NO: 6 - protein, 251 aa, Artificial Sequence
  Shiga toxin subtype e Subunit A (Stx1eA)
QDFTVDFSTAKKYVDSLNAIRSAIGTPLHSISSGGTSLLMIDNGTGDNLFAVDIRGLDPEEERFDNLRLIIERNNLYVTGFVNRTSNIFYRFADFSHVTFPGTRAVTLSGDSSYTTLQRVAGIGRTGMQINRHSLTTSYLDLMSYSGSSLTQPVARAMLRFVTVTAEALRFRQIQRGFRTTLDDVSGHSYTMTVEDVDLTLNWGRLSSVLPDYHGQDSVRVGRISFGGVNAILGSVALILNCHHHTSRVSR

SEQ ID NO: 7 - protein, 250 aa, Artificial Sequence
  Shiga toxin subtype 2c Subunit A (Stx2cA) variant 1
REFTIDFSTQQSYVSSLNSIRTEISTPLEHISQGTTSVSVINHTPPGSYFAVDIRGLDVYQARFDHLRLIIEQNNLYVAGFVNTATNTFYRFSDFTHISVPGVTTVSMTTDSSYTTLQRVAALERSGMQISRHSLVSSYLALMEFSGNTMTRDASRAVLRFVTVTAEALRFRQIQREFRQALSETAPVYTMTPGDVDLTLNWGRISNVLPEYRGEDGVRVGRISFNNISAILGTVAVILNCHHQGARSVR

SEQ ID NO: 8 - protein, 250 aa, Artificial Sequence
  Shiga toxin subtype 2c Subunit A (Stx2cA) variant 2
REFTIDFSTQQSYVSSLNSIRTEISTPLEHISQGTTSVSVINHTPPGSYFAVDIRGLDVYQARFDHLRLIIEQNNLYVAGFVNTATNTFYRFSDFAHISVPGVTTVSMTTDSSYTTLQRVAALERSGMQISRHSLVSSYLALMEFSGNTMTRDASRAVLRFVTVTAEALRFRQIQREFRQALSETAPVYTMTPGDVDLTLNWGRISNVLPEYRGEDGVRVGRISFNNISAILGTVAVILNCHHQGARSVR

SEQ ID NO: 9 - protein, 250 aa, Artificial Sequence
  Shiga toxin subtype 2c Subunit A (Stx2cA) variant 3
REFTIDFSTQQSYVSSLNSIRTEISTPLEHISQGTTSVSVINHTPPGSYFAVDIRGLDIYQARFDHLRLIIEQNNLYVAGFVNTATNTFYRFSDFTHISVPGVTTVSMTTDSSYTTLQRVAALERSGMQISRHSLVSSYLALMEFSGNTMTRDASRAVLRFVTVTAEALRFRQIQREFRQALSETAPVYTMTPGDVDLTLNWGRISNVLPEYRGEDGVRVGRISFNNISAILGTVAVILNCHHQGARSVR

SEQ ID NO: 10 - protein, 250 aa, Artificial Sequence
  Shiga toxin subtype 2c Subunit A (Stx2cA) variant 4
REFTIDFSTQQSYVSSLNSIRTEISTPLEHISQGTTSVSVINHTPPGSYFAVDIRGLDVYQARFDHLRLIIEQNNLYVAGFVNTATNTFYRFSDFTHISVPSVTTVSMTTDSSYTTLQRVAALERSGMQISRHSLVSSYLALMEFSGNTMTRDASRAVLRFVTVTAEALRFRQIQREFRQALSETAPVYTMTPGDVDLTLNWGRISNVLPEYRGEDGVRVGRISFNNISAILGTVAVILNCHHQGARSVR

SEQ ID NO: 11 - protein, 250 aa, Artificial Sequence
  Shiga toxin subtype 2c Subunit A (Stx2cA) variant 5
REFTIDFSTQQSYVSSLNSIRTEISTPLEHISQGTTSVSVINHTPPGSYFAVDIRGLDVYQARFDHLRLIIEQNNLYMAGFVNTATNTFYRFSDFTHISVPSVTTVSMTTDSSYTTLQRVAALERSGMQISRHSLVSSYLALMEFSGNTMTRDASRAVLRFVTVTAEALRFRQIQREFRQALSETAPVYTMTPGDVDLTLNWGRISNVLPEYRGEDGVRVGRISFNNISAILGTVAVILNCHHQGARSVR

SEQ ID NO: 12 - protein, 250 aa, Artificial Sequence
  Shiga toxin subtype 2c Subunit A (Stx2cA) variant 6
REFTIDFSTQQSYVSSLNSIRTEISTPLEHISQGTTSVSVINHTPPGSYFAVDIRGLDVYQARFDHLRLIIEQNNLYVAGFVNTATNTFYRFSDFTHISVPGVTTVSMTTDSSYTTLQRVAALERSGMQISRHSLVSSYLALMEFSGNTMTRDASRAVLRFVTVTAEALRFRQIQREFRQVLSETAPVYTMTPGDVDLTLNWGRISNVLPEYRGEDGVRVGRISFNNISAILSTVAVILNCHHQGARSVR

SEQ ID NO: 13 - protein, 250 aa, Artificial Sequence
  Shiga toxin subtype 2d Subunit A (Stx2dA) variant 1
REFTIDFSTQQSYVSSLNSIRTEISTPLEHISQGTTSVSVINHTPPGSYFAVDIRGLDVYQARFDHLRLIIEQNNLYVAGFVNTATNTFYRFSDFAHISVPGVTTVSMTTDSSYTTLQRVAALERSGMQISRHSLVSSYLALMEFSGNTMTRDASRAVLRFVTVTAEALRFRQIQREFRQALSETAPVYTMTPGDVDLTLNWGRISNVIPEYRGEDGVRVGRISFNNISAILGTVAVILNCHHQGARSVR

SEQ ID NO: 14 - protein, 250 aa, Artificial Sequence
  Shiga toxin subtype 2d Subunit A (Stx2dA) variant 2
REFMIDFSTQQSYVSSLNSIRTEISTPLEHISQGTTSVSVINHTPPGSYFAVDIRGLDVYQARFDHLRLIIEQNNLYVAGFVNTATNTFYRFSDFTHISVPGVTTVSMTTDSSYTTLQRVAALERSGMQISRHSLVSSYLALMEFSGNTMTRDASRAVLRFVTVTAEALRFRQIQREFRQALSETAPVYTMTPEEVDLTLNWGRISNVLPEFRGEGGVRVGRISFNNISAILGTVAVILNCHHQGARSVR

SEQ ID NO: 15 - protein, 250 aa, Artificial Sequence
  Shiga toxin subtype 2d Subunit A (Stx2dA) variant 3
REFTIDFSTQQSYVSSLNSIRTEISTPLEHISQGTTSVSVINHTPPGSYFAVDIRGLDVYQARFDHLRLIIEQNNLYVAGFVNTATNTFYRFSDFTHISVPGVTTVSMTTDSSYTTLQRVAALERSGMQISRHSLVSSYLALMEFSGNTMTRDASRAVLRFVTVTAEALRFRQIQREFRQALSETAPVYTMTPGDVDLTLNWGRISNVIPEYRGEDGVRVGRISFNNISAILSTVAVILNCHHQGARSVR

SEQ ID NO: 16 - protein, 250 aa, Artificial Sequence
  Shiga toxin subtype 2e Subunit A (Stx2eA) variant 1
QEFTIDFSTQQSYVSSLNSIRTAISTPLEHISQGATSVSVINHTPPGSYISVGIRGLDVYQERFDHLRLIIERNNLYVAGFVNTTTNTFYRFSDFAHISLPGVTTISMTTDSSYTTLQRVAALERSGMQISRHSLVSSYLALMEFSGNTMTRDASRAVLRFVTVTAEALRFRQIQREFRLALSETAPVYTMTPEDVDLTLNWGRISNVLPEYRGEAGVRVGRISFNNISAILGTVAVILNCHHQGARSVR

SEQ ID NO: 17 - protein, 250 aa, Artificial Sequence
  Shiga toxin subtype 2e Subunit A (Stx2eA) variant 2
QEFTIDFSTQQSYVSSLNSIRTAISTPLEHISQGATSVSVINHTPPGSYISVGIRGLDVYQAHFDHLRLIIEQNNLYVAGFVNTATNTFYRFSDFAHISLPGVTTISMTTDSSYTTLQRVAALERSGMQISRHSLVSSYLALMEFSGNTMTREASRAVLRFVTVTAEALRFRQIQREFRQALSETAPVYTMTPEDVDLTLNWGRISNVLPEYRGEDGVRVGRISFNNISAILGTVAVILNCHHQGARSVR

SEQ ID NO: 18 - protein, 250 aa, Artificial Sequence
  Shiga toxin subtype 2f Subunit A (Stx2fA)
DEFTVDFSSQKSYVDSLNSIRSAISTPLGNISQGGVSVSVINHVPGGNYISLNVRGLDPYSERFNHLRLIMERNNLYVAGFINTETNTFYRFSDFSHISVPDVITVSMTTDSSYSSLQRIADLERTGMQIGRHSLVGSYLDLMEFRGRSMTRASSRAMLRFVTVIAEALRFRQIQRGFRPALSEASPLYTMTAQDVDLTLNWGRISNVLPEYRGEEGVRIGRISFNSLSAILGSVAVILNCHSTGSYSVR

SEQ ID NO: 19 - protein, 14 aa, Artificial Sequence
  light chain HVR CDR1
TGTSSDVGSYNRVS

SEQ ID NO: 20 - protein, 7 aa, Artificial Sequence
  light chain HVR CDR2
EVSNRPS

SEQ ID NO: 21 - protein, 10 aa, Artificial Sequence
  light chain HVR CDR3
SSHTTSGTYV

SEQ ID NO: 22 - protein, 5 aa, Artificial Sequence
  heavy chain HVR CDR1
SYAIS

SEQ ID NO: 23 - protein, 17 aa, Artificial Sequence
  heavy chain HVR CDR2
GIIPIFGTANYAQKFQG

SEQ ID NO: 24 - protein, 10 aa, Artificial Sequence
  heavy chain HVR CDR3
DQGYAHAFDI

SEQ ID NO: 25 - protein, 110 aa, Artificial Sequence
  light chain 1
QSALTQPASVSGSPGQSITISCTGTSSDVGSYNRVSWYQQPPGTAPKLMIYEVSNRPSGVSNRFSGSKSGNTASLTISGLQAEDEADYYCSSHTTSGTYVFGTGTKLTVL

SEQ ID NO: 26 - protein, 119 aa, Artificial Sequence
  heavy chain
EVQLVQSGAEVKKPGASVKVSCKASGGTFSSYAISWVRQAPGQGLEWMGGIIPIFGTANYAQKFQGRVTITADESTSTAYMELSSLRSEDTAVYYCARDQGYAHAFDIWGRGTTVTVSS

SEQ ID NO: 27 - protein, 111 aa, Artificial Sequence
  light chain 2
DIQMTQSPSSLSASVGDRVTITCTGTSSDVGSYNRVSWYQQPPGTAPKLMIYEVSNRPSGVSNRFSGSKSGNTASLTISGLQAEDEADYYCSSHTTSGTYVFGTGTKLTVL

SEQ ID NO: 28 - protein, 255 aa, Artificial Sequence
  single-chain variable fragment I
EVQLVQSGAEVKKPGASVKVSCKASGGTFSSYAISWVRQAPGQGLEWMGGIIPIFGTANYAQKFQGRVTITADESTSTAYMELSSLRSEDTAVYYCARDQGYAHAFDIWGRGTTVTVSSGGGGSGGGGSGGGGSGGGGSGGGGSDIQMTQSPSSLSASVGDRVTITCTGTSSDVGSYNRVSWYQQPPGTAPKLMIYEVSNRPSGVSNRFSGSKSGNTASLTISGLQAEDEADYYCSSHTTSGTYVFGTGTKLTVL

SEQ ID NO: 29 - protein, 255 aa, Artificial Sequence
  single-chain variable fragment II
DIQMTQSPSSLSASVGDRVTITCTGTSSDVGSYNRVSWYQQPPGTAPKLMIYEVSNRPSGVSNRFSGSKSGNTASLTISGLQAEDEADYYCSSHTTSGTYVFGTGTKLTVLGGGGSGGGGSGGGGSGGGGSGGGGSEVQLVQSGAEVKKPGASVKVSCKASGGTFSSYAISWVRQAPGQGLEWMGGIIPIFGTANYAQKFQGRVTITADESTSTAYMELSSLRSEDTAVYYCARDQGYAHAFDIWGRGTTVTVSS

SEQ ID NO: 30 - protein, 235 aa, Artificial Sequence
  single-chain variable fragment III
EVQLVQSGAEVKKPGASVKVSCKASGGTFSSYAISWVRQAPGQGLEWMGGIIPIFGTANYAQKFQGRVTITADESTSTAYMELSSLRSEDTAVYYCARDQGYAHAFDIWGRGTTVTVSSGGGGSDIQMTQSPSSLSASVGDRVTITCTGTSSDVGSYNRVSWYQQPPGTAPKLMIYEVSNRPSGVSNRFSGSKSGNTASLTISGLQAEDEADYYCSSHTTSGTYVFGTGTKLTVL

SEQ ID NO: 31 - protein, 235 aa, Artificial Sequence
  single-chain variable fragment IV
DIQMTQSPSSLSASVGDRVTITCTGTSSDVGSYNRVSWYQQPPGTAPKLMIYEVSNRPSGVSNRFSGSKSGNTASLTISGLQAEDEADYYCSSHTTSGTYVFGTGTKLTVLGGGGSEVQLVQSGAEVKKPGASVKVSCKASGGTFSSYAISWVRQAPGQGLEWMGGIIPIFGTANYAQKFQGRVTITADESTSTAYMELSSLRSEDTAVYYCARDQGYAHAFDIWGRGTTVTVSS

SEQ ID NO: 32 - protein, 254 aa, Artificial Sequence
  single-chain variable fragment V
EVQLVQSGAEVKKPGASVKVSCKASGGTFSSYAISWVRQAPGQGLEWMGGIIPIFGTANYAQKFQGRVTITADESTSTAYMELSSLRSEDTAVYYCARDQGYAHAFDIWGRGTTVTVSSGGGGSGGGGSGGGGSGGGGSGGGGSQSALTQPASVSGSPGQSITISCTGTSSDVGSYNRVSWYQQPPGTAPKLMIYEVSNRPSGVSNRFSGSKSGNTASLTISGLQAEDEADYYCSSHTTSGTYVFGTGTKLTVL

SEQ ID NO: 33 - protein, 254 aa, Artificial Sequence
  single-chain variable fragment VI
QSALTQPASVSGSPGQSITISCTGTSSDVGSYNRVSWYQQPPGTAPKLMIYEVSNRPSGVSNRFSGSKSGNTASLTISGLQAEDEADYYCSSHTTSGTYVFGTGTKLTVLGGGGSGGGGSGGGGSGGGGSGGGGSEVQLVQSGAEVKKPGASVKVSCKASGGTFSSYAISWVRQAPGQGLEWMGGIIPIFGTANYAQKFQGRVTITADESTSTAYMELSSLRSEDTAVYYCARDQGYAHAFDIWGRGTTVTVSS

SEQ ID NO: 34 - protein, 234 aa, Artificial Sequence
  single-chain variable fragment VII
EVQLVQSGAEVKKPGASVKVSCKASGGTFSSYAISWVRQAPGQGLEWMGGIIPIFGTANYAQKFQGRVTITADESTSTAYMELSSLRSEDTAVYYCARDQGYAHAFDIWGRGTTVTVSSGGGGSQSALTQPASVSGSPGQSITISCTGTSSDVGSYNRVSWYQQPPGTAPKLMIYEVSNRPSGVSNRFSGSKSGNTASLTISGLQAEDEADYYCSSHTTSGTYVFGTGTKLTVL

SEQ ID NO: 35 - protein, 234 aa, Artificial Sequence
  single-chain variable fragment VIII
QSALTQPASVSGSPGQSITISCTGTSSDVGSYNRVSWYQQPPGTAPKLMIYEVSNRPSGVSNRFSGSKSGNTASLTISGLQAEDEADYYCSSHTTSGTYVFGTGTKLTVLGGGGSEVQLVQSGAEVKKPGASVKVSCKASGGTFSSYAISWVRQAPGQGLEWMGGIIPIFGTANYAQKFQGRVTITADESTSTAYMELSSLRSEDTAVYYCARDQGYAHAFDIWGRGTTVTVSS

SEQ ID NO: 36 - protein, 7 aa, Artificial Sequence
  heavy chain HVR CDR1
GGTFSSY

SEQ ID NO: 37 - protein, 6 aa, Artificial Sequence
  heavy chain HVR CDR2
IPIFGT

SEQ ID NO: 38 - protein, 235 aa, Artificial Sequence; identical to SEQ ID NO: 31
  scFva

SEQ ID NO: 39 - protein, 231 aa, Artificial Sequence
  scFvb
DIVLTQSPASLAVSLGQRATISCRATESVEYYGTSLVQWYQQKPGQPPKLLIYAASSVDSGVPARFSGSGSGTDFSLTIHPVEEDDIAMYFCQQSRRVPYTFGGGTKLEIKGGGGSEVQLQQSGPELVKPGASVKMSCKASGYTFTSYVMHWVKQKPGQGLEWIGYVNPFNDGTKYNEMFKGKATLTSDKSSSTAYMELSSLTSEDSAVYYCARQAWGYPWGQGTLVTVSA

SEQ ID NO: 40 - protein, 240 aa, Artificial Sequence
  scFvb::C1
DIVLTQSPASLAVSLGQRATISCRATESVEYYGTSLVQWYQQKPGQPPKLLIYAASSVDSGVPARFSGSGSGTDFSLTIHPVEEDDIAMYFCQQSRRVPYTFGGGTKLEIKGGGGSEVQLQQSGPELVKPGASVKMSCKASGYTFTSYVMHWVKQKPGQGLEWIGYVNPFNDGTKYNEMFKGKATLTSDKSSSTAYMELSSLTSEDSAVYYCARQAWGYPWGQGTLVTVSANLVPMVATV

SEQ ID NO: 41 - protein, 251 aa, Artificial Sequence
  DI-SLTA-1
KEFTLDFSTAKTYVDSLNVIRSAIGTPLQTISSGGTSLLMIDSGIGDNLFAVDILGFDFTLGRFNNLRLIVERNNLYVTGFVNRTNNVFYRFADFSHVTFPGTTAVTLSADSSYTTLQRVAGISRTGMQINRHSLTTSYLDLMSHSGTSLTQSVARAMLRFVTVTAEALRFRQIQRGFRTTLDDLSGASYVMTAEDVDLTLNWGRLSSVLPDYHGQDSVRVGRISFGSINAILGSVALILNSHHHASAVAA

SEQ ID NO: 42 - protein, 251 aa, Artificial Sequence
  SLTA-DI-1
AEFTLDFSTAKTYVDSLNVIRSAIGTPLQTISSGGTSLLMIDSGIGDNLFAVDILGFDFTLGRFNNLRLIVERNNLYVTGFVNRTNNVFYRFADFSHVTFPGTTAVTLSADSSYTTLQRVAGISRTGMQINRHSLTTSYLDLMSHSATSLTQSVARAMLRFVTVTAEALRFRQIQRGFRTTLDDLSGRSYVMTAEDVDLTLNWGRLSSVLPDYHGQDSVRVGRISFGSINAILGSVALILNSHHHASAVAA

SEQ ID NO: 43 - protein, 251 aa, Artificial Sequence; identical to SEQ ID NO: 41
  SLTA-DI-2

SEQ ID NO: 44 - protein, 251 aa, Artificial Sequence
  SLTA-DI-3
REFTLDFSTARTYVDSLNVIRSAIGTPLQTISSGGTSLLMIDSGIGDNLFAVDILGFDFTLGRFNNLRLIVERNNLYVTGFVNRTNNVFYRFADFSHVTFPGTTAVTLSADSSYTTLQRVAGISRTGMQINRHSLTTSYLALMSHSGTSLTQSVARAMLRFVTVTAEALRFRQIQRGFRTTLDDLSGASYVMTAEDVDLTLNWGRLSSVLPDYHGQDSVRVGRISFGSINAILGSVALILNSHHHASAVAA

SEQ ID NO: 45 - protein, 251 aa, Artificial Sequence; identical to SEQ ID NO: 42
  Shiga toxin effector polypeptide SLT-1A-DI-FR

SEQ ID NO: 46 - protein, 251 aa, Artificial Sequence; identical to SEQ ID NO: 41
  Shiga toxin effector polypeptide SLT-1A-DI-1

SEQ ID NO: 47 - protein, 251 aa, Artificial Sequence
  Shiga toxin effector polypeptide SLT-1A-DI-2
KEFTLDFSTAKTYVDSLNVIRSAIGTPLQTISSGGTSLLMIDSGIGDNLFAVDILGFDFTLGRFNNLRLIVERNNLYVTGFVNRTNNVFYRFADFSHVTFPGTTAVTLSADSSYTTLQRVAGISRTGMQINRHSLTTSYLALMSHSGTSLTQSVARAMLRFVTVTAEALRFRQIQRGFRTTLDDLSGASYVMTAEDVDLTLNWGRLSSVLPDYHGQDSVRVGRISFGSINAILGSVALILNSHHHASAVAA

SEQ ID NO: 48 - protein, 251 aa, Artificial Sequence
  Shiga toxin effector polypeptide SLT-1A-DI-3
KEFTLDFSTAKTYVDSLNVIRSAIGTPLQTISSGGTSLLMIDSGIGDNLFAVDILGFDFTLGRFNNLRLIVERNNLYVTGFVNRTNNAFYRFADFSHVTFPGTTAVTLSADSSYTTLQRVAGISRTGMQINRHSLTTSYLALMSHSGTSLTQSAARAMLRFVTVTAEALRFRQIQRGFRTTLDDLSGASYVMTAEDVDLTLNWGRLSSVLPDYHGQDSVRVGRISFGSINAILGSVALILNSHHHASAVAA

SEQ ID NO: 49 - protein, 251 aa, Artificial Sequence
  Shiga toxin effector polypeptide SLT-1A-DI-4
KEFTLDFSTAKTYVDSLNVIRSAIGTPLQTISSGGTSLLMIDSGSGDNLFAVDVRGIDPEEGRFNNLRLIVERNNLYVTGFVNRTNNVFYRFADFSHVTFPGTTAVTLSGDSSYTTLQRVAGISRTGMQINRHSLTTSYLDLMSHSGTSLTQSVARAMLRFVTVTAEALRFRQIQRGFRTTLDDLSGRSYVMTAEDVDLTLNWGRLSSVLPDYHGQDSVRVGRISFGSINAILGSVALILNCHHHASAVAA

SEQ ID NO: 50 - protein, 251 aa, Artificial Sequence
  Shiga toxin effector polypeptide SLT-1A-DI-FR inactive
AEFTLDFSTAKTYVDSLNVIRSAIGTPLQTISSGGTSLLMIDSGIGDNLFAVDILGFDFTLGRFNNLRLIVERNNLYVTGFVNRTNNVFYRFADFSHVTFPGTTAVTLSADSSYTTLQRVAGISRTGMQINRHSLTTSYLDLMSHSATSLTQSVARAMLRFVTVTADALRFRQIQRGFRTTLDDLSGRSYVMTAEDVDLTLNWGRLSSVLPDYHGQDSVRVGRISFGSINAILGSVALILNSHHHASAVAA

SEQ ID NO: 51 - protein, 251 aa, Artificial Sequence
  Shiga toxin effector polypeptide SLT-1A-DI-1 inactive
KEFTLDFSTAKTYVDSLNVIRSAIGTPLQTISSGGTSLLMIDSGIGDNLFAVDILGFDFTLGRFNNLRLIVERNNLYVTGFVNRTNNVFYRFADFSHVTFPGTTAVTLSADSSYTTLQRVAGISRTGMQINRHSLTTSYLDLMSHSGTSLTQSVARAMLRFVTVTADALRFRQIQRGFRTTLDDLSGASYVMTAEDVDLTLNWGRLSSVLPDYHGQDSVRVGRISFGSINAILGSVALILNSHHHASAVAA

SEQ ID NO: 52 - protein, 251 aa, Artificial Sequence
  Shiga toxin effector polypeptide SLT-1A-DI-2 inactive
KEFTLDFSTAKTYVDSLNVIRSAIGTPLQTISSGGTSLLMIDSGIGDNLFAVDILGFDFTLGRFNNLRLIVERNNLYVTGFVNRTNNVFYRFADFSHVTFPGTTAVTLSADSSYTTLQRVAGISRTGMQINRHSLTTSYLALMSHSGTSLTQSVARAMLRFVTVTADALRFRQIQRGFRTTLDDLSGASYVMTAEDVDLTLNWGRLSSVLPDYHGQDSVRVGRISFGSINAILGSVALILNSHHHASAVAA

SEQ ID NO: 53 - protein, 251 aa, Artificial Sequence
  Shiga toxin effector polypeptide SLT-1A-DI-3 inactive
KEFTLDFSTAKTYVDSLNVIRSAIGTPLQTISSGGTSLLMIDSGIGDNLFAVDILGFDFTLGRFNNLRLIVERNNLYVTGFVNRTNNAFYRFADFSHVTFPGTTAVTLSADSSYTTLQRVAGISRTGMQINRHSLTTSYLALMSHSGTSLTQSAARAMLRFVTVTADALRFRQIQRGFRTTLDDLSGASYVMTAEDVDLTLNWGRLSSVLPDYHGQDSVRVGRISFGSINAILGSVALILNSHHHASAVAA

SEQ ID NO: 54 - protein, 251 aa, Artificial Sequence
  Shiga toxin effector polypeptide SLT-1A-DI-4 inactive
KEFTLDFSTAKTYVDSLNVIRSAIGTPLQTISSGGTSLLMIDSGSGDNLFAVDVRGIDPEEGRFNNLRLIVERNNLYVTGFVNRTNNVFYRFADFSHVTFPGTTAVTLSGDSSYTTLQRVAGISRTGMQINRHSLTTSYLDLMSHSGTSLTQSVARAMLRFVTVTADALRFRQIQRGFRTTLDDLSGRSYVMTAEDVDLTLNWGRLSSVLPDYHGQDSVRVGRISFGSINAILGSVALILNCHHHASAVAA

SEQ ID NO: 55 - protein, 251 aa, Artificial Sequence
  SLT-1A-combo27
KEFILRFSVAHKYVDSLNVIRSAIGTPLQTISSGGTSLLMIDSGSGDNLFAVDVRGIDPEEGRFNNLRLIVERNNLYVTGFVNRTNNVFYRFADFSHVTFPGTTAVTLSGDSSYTTLQRVAGISRTGMQINRHSLTTSYLDLMSHSGTSLTQSVARAMLRFVTVTAEALRFRQIQRGFRTTLDDLSGRSYVMTAEDVDLTLNWGRLSSVLPDYHGQDSVRVGRISFGSINAILGSVALILNCHHHASAVAA

SEQ ID NO: 56 - protein, 251 aa, Artificial Sequence
  SLT-1A-combo28
KEFTLDFSTAKTYVDSLNVIRSAIGTPLQTISSGGTSLLMIDNLVPMVATVVDVRGIDPEEGRFNNLRLIVERNNLYVTGFVNRTNNVFYRFADFSHVTFPGTTAVTLSGDSSYTTLQRVAGISRTGMQINRHSLTTSYLDLMSHSGTSLTQSVARAMLRFVTVTAEALRFRQIQRGFRTTLDDLSGRSYVMTAEDVDLTLNWGRLSSVLPDYHGQDSVRVGRISFGSINAILGSVALILNCHHHASAVAA

SEQ ID NO: 57 - protein, 251 aa, Artificial Sequence
  SLT-1A-combo29
KEFTLDFSTAKTYVDSLNVIRSAIGTPLQTISSGGTSLLMIDSNLVPMVATVDVRGIDPEEGRFNNLRLIVERNNLYVTGFVNRTNNVFYRFADFSHVTFPGTTAVTLSGDSSYTTLQRVAGISRTGMQINRHSLTTSYLDLMSHSGTSLTQSVARAMLRFVTVTAEALRFRQIQRGFRTTLDDLSGRSYVMTAEDVDLTLNWGRLSSVLPDYHGQDSVRVGRISFGSINAILGSVALILNCHHHASAVAA

SEQ ID NO: 58 - protein, 251 aa, Artificial Sequence
  SLT-1A-combo30
KEFTLDFSTAKTYVDSLNVIRSAIGTPLQTISSGGTSLLMIDSGILGFVFTLDVRGIDPEEGRFNNLRLIVERNNLYVTGFVNRTNNVFYRFADFSHVTFPGTTAVTLSGDSSYTTLQRVAGISRTGMQINRHSLTTSYLDLMSHSGTSLTQSVARAMLRFVTVTAEALRFRQIQRGFRTTLDDLSGRSYVMTAEDVDLTLNWGRLSSVLPDYHGQDSVRVGRISFGSINAILGSVALILNCHHHASAVAA

SEQ ID NO: 59 - protein, 251 aa, Artificial Sequence
  SLT-1A-combo31
KEFTLDFSTAKTYVDSLNVIRSAIGTPLQTISSGGTSLLMIDSGSGDNLFAVGILGFDFTLGRFNNLRLIVERNNLYVTGFVNRTNNVFYRFADFSHVTFPGTTAVTLSGDSSYTTLQRVAGISRTGMQINRHSLTTSYLDLMSHSGTSLTQSVARAMLRFVTVTAEALRFRQIQRGFRTTLDDLSGRSYVMTAEDVDLTLNWGRLSSVLPDYHGQDSVRVGRISFGSINAILGSVALILNCHHHASAVAA

SEQ ID NO: 60 - protein, 251 aa, Artificial Sequence
  SLT-1A-combo32
KEFTLDFSTAKTYVDSLNVIRSAIGTPLQTISSGGTSLLMIDSGSGDNLFAVDILGFVFTLGRFNNLRLIVERNNLYVTGFVNRTNNVFYRFADFSHVTFPGTTAVTLSGDSSYTTLQRVAGISRTGMQINRHSLTTSYLDLMSHSGTSLTQSVARAMLRFVTVTAEALRFRQIQRGFRTTLDDLSGRSYVMTAEDVDLTLNWGRLSSVLPDYHGQDSVRVGRISFGSINAILGSVALILNCHHHASAVAA

SEQ ID NO: 61 - protein, 251 aa, Artificial Sequence
  SLT-1A-combo33
KEFTLDFSTAKTYVDSLNVIRSAIGTPLQTISSGGTSLLMIDSGSGDNLFAVDILGFDFTLGRFNNLRLIVERNNLYVTGFVNRTNNVFYRFADFSHVTFPGTTAVTLSGDSSYTTLQRVAGISRTGMQINRHSLTTSYLDLMSHSGTSLTQSVARAMLRFVTVTAEALRFRQIQRGFRTTLDDLSGRSYVMTAEDVDLTLNWGRLSSVLPDYHGQDSVRVGRISFGSINAILGSVALILNCHHHASAVAA

SEQ ID NO: 62 - protein, 251 aa, Artificial Sequence
  SLT-1A-combo34
KEFTLDFSTAKTYVDSLNVIRSAIGTPLQTISSGGTSLLMIDSGSGDNLFAVGILGFVFTLGRFNNLRLIVERNNLYVTGFVNRTNNVFYRFADFSHVTFPGTTAVTLSGDSSYTTLQRVAGISRTGMQINRHSLTTSYLDLMSHSGTSLTQSVARAMLRFVTVTAEALRFRQIQRGFRTTLDDLSGRSYVMTAEDVDLTLNWGRLSSVLPDYHGQDSVRVGRISFGSINAILGSVALILNCHHHASAVAA

SEQ ID NO: 63 - protein, 251 aa, Artificial Sequence
  SLT-1A-combo35
KEFILDFSTAKTYVDSLNVIRSAIGTPLQTISSGGTSLLMIDSGIGDNLFAVDVRGIAPIEARFNNLRLIVERNNLYVTGFVNRTNNVFYRFADFSHVTFPGTTAVTLSADSSYTTLQRVAGISRTGMQINRHSLTTSYLDLMSHSATSLTQSVARAMLRFVTVTAEALRFRQIQRGFRTTLAALSGASYVMTAEDVDLTLNWGRLSSVLPDYHGQDSVRVGRISFGSINAILGSVALILNSHHHASAVAA

SEQ ID NO: 64 - protein, 252 aa, Artificial Sequence
  SLT-1A-combo36
KEFTLDFSTAKTYVDSLNVIRSAIGTPLQTISSGGTSLLMIDSGSGDNLFAVGILGFVFTLEGRFNNLRLIVERNNLYVTGFVNRTNNVFYRFADFSHVTFPGTTAVTLSGDSSYTTLQRVAGISRTGMQINRHSLTTSYLDLMSHSGTSLTQSVARAMLRFVTVTAEALRFRQIQRGFRTTLDDLSGRSYVMTAEDVDLTLNWGRLSSVLPDYHGQDSVRVGRISFGSINAILGSVALILNCHHHASAVAA

SEQ ID NO: 65 - protein, 251 aa, Artificial Sequence
  SLT-1A-combo37
KEFTLDFSTAKTYVDSLNVIRSAIGTPLQTISSGGTSLLMIDSGSGDNLFAVNLVPMVATVGRFNNLRLIVERNNLYVTGFVNRTNNVFYRFADFSHVTFPGTTAVTLSGDSSYTTLQRVAGISRTGMQINRHSLTTSYLDLMSHSGTSLTQSVARAMLRFVTVTAEALRFRQIQRGFRTTLDDLSGRSYVMTAEDVDLTLNWGRLSSVLPDYHGQDSVRVGRISFGSINAILGSVALILNCHHHASAVAA

SEQ ID NO: 66 - protein, 251 aa, Artificial Sequence
  SLT-1A-combo38
KEFTLDFSTAKTYVDSLNVIRSAIGTPLQTISSGGTSLLMIDSGSGDNLFAVDVRGIDPEEGRFNNLRLIVERNNLYVTGFVNRTNNVFYRFADFSHVTFPGTNLVPMVATVSYTTLQRVAGISRTGMQINRHSLTTSYLDLMSHSGTSLTQSVARAMLRFVTVTAEALRFRQIQRGFRTTLDDLSGRSYVMTAEDVDLTLNWGRLSSVLPDYHGQDSVRVGRISFGSINAILGSVALILNCHHHASAVAA

SEQ ID NO: 67 - protein, 251 aa, Artificial Sequence
  SLT-1A-combo39
KEFTLDFSTAKTYVDSLNVIRSAIGTPLQTISSGGTSLLMIDSGSGDNLFAVDVRGIDPEEGRFNNLRLIVERNNLYVTGFVNRTNNVFYRFADFSHVTFPGTTAVTLSGDSSYTTLQRVAGISRTGMQINRHSLTTSYLDLMSHSGTSLTQSVARAMLRFVTVTAEALRFRQIQRGFRGILGDVFTLSYVMTAEDVDLTLNWGRLSSVLPDYHGQDSVRVGRISFGSINAILGSVALILNSHHHASAVAA

SEQ ID NO: 68 - protein, 260 aa, Artificial Sequence
  SLT-1A-combo40
KEFTLDFSTAKTYVDSLNVIRSAIGTPLQTISSGGTSLLMIDSGSGDNLFAVDVRGIDPEEGRFNNLRLIVERNNLYVTGFVNRTNNVFYRFADFSHVTFPGTTAVTLSGDSSYTTLQRVAGISRTGMQINRHSLTTSYLDLMSHSGTSLTQSVARAMLRFVTVTAEALRFRQIQRGFRTTLDDLSGRSYVMTAEDVDLTLNWGRLSSVLPDYHGQDSVRVGRISFGSINAILGSVALILNCHHHILRFSVAHKASAVAA

SEQ ID NO: 69 - protein, 262 aa, Artificial Sequence
  SLT-1A-combo41
KEFTLDFSTAKTYVDSLNVIRSAIGTPLQTISSGGTSLLMIDSGSGDNLFAVDILGFDFTLGRFNNLRLIVERNNLYVTGFVNRTNNVFYRFADFSHVTFPGTTAVTLSGDSSYTTLQRVAGISRTGMQINRHSLTTSYLDLMSHSGTSLTQSVARAMLRFVTVTAEALRFRQIQRGFRTTLDDLSGRSYVMTAEDVDLTLNWGRLSSVLPDYHGQDSVRVGRISFGSINAILGSVALILNCHHHARNLVPMVATVASAVAA

SEQ ID NO: 70 - protein, 25 aa, Artificial Sequence
  linker 1
GGGGSGGGGSGGGGSGGGGSGGGGS

SEQ ID NO: 71 - protein, 20 aa, Artificial Sequence
  linker 2
GGGGSGGGGSGGGGSGGGGS

SEQ ID NO: 72 - protein, 18 aa, Artificial Sequence
  linker 3
GSTSGSGKPGSGEGSTKG

SEQ ID NO: 73 - protein, 5 aa, Artificial Sequence
  linker 4
GGGGS

SEQ ID NO: 74 - protein, 16 aa, Artificial Sequence
  linker 5
EFPKPSTPPGSSGGAP

SEQ ID NO: 75 - protein, 25 aa, Artificial Sequence
  linker 6
EFPKPSTPPGSSGGAPGILGFVFTL

SEQ ID NO: 76 - protein, 15 aa, Artificial Sequence
  linker 7
GSTSGSGKPGSGEGS

SEQ ID NO: 77 - protein, 9 aa, Artificial Sequence
  T-cell epitope-peptide C1
NLVPMVATV

SEQ ID NO: 78 - protein, 9 aa, Artificial Sequence
  T-cell epitope-peptide C2
VTEHDTLLY

SEQ ID NO: 79 - protein, 9 aa, Artificial Sequence
  T-cell epitope-peptide C4
SIINFEKYL

SEQ ID NO: 80 - protein, 9 aa, Artificial Sequence
  T-cell epitope-peptide C1-2
GLDRNSGNY

SEQ ID NO: 81 - protein, 9 aa, Artificial Sequence
  T-cell epitope-peptide C3
GVMTRGRLK

SEQ ID NO: 82 - protein, 9 aa, Artificial Sequence
  T-cell epitope-peptide F2
GILGFVFTL

SEQ ID NO: 83 - protein, 9 aa, Artificial Sequence
  T-cell epitope-peptide F3
ILRGSVAHK

SEQ ID NO: 84 - protein, 499 aa, Artificial Sequence
  DI-SLTA-1::scFvb
MKEFTLDFSTAKTYVDSLNVIRSAIGTPLQTISSGGTSLLMIDSGIGDNLFAVDILGFDFTLGRFNNLRLIVERNNLYVTGFVNRTNNVFYRFADFSHVTFPGTTAVTLSADSSYTTLQRVAGISRTGMQINRHSLTTSYLDLMSHSGTSLTQSVARAMLRFVTVTAEALRFRQIQRGFRTTLDDLSGASYVMTAEDVDLTLNWGRLSSVLPDYHGQDSVRVGRISFGSINAILGSVALILNSHHHASAVAAEFPKPSTPPGSSGGAPDIVLTQSPASLAVSLGQRATISCRATESVEYYGTSLVQWYQQKPGQPPKLLIYAASSVDSGVPARFSGSGSGTDFSLTIHPVEEDDIAMYFCQQSRRVPYTFGGGTKLEIKGGGGSEVQLQQSGPELVKPGASVKMSCKASGYTFTSYVMHWVKQKPGQGLEWIGYVNPFNDGTKYNEMFKGKATLTSDKSSSTAYMELSSLTSEDSAVYYCARQAWGYPWGQGTLVTVSA

SEQ ID NO: 85 - protein, 508 aa, Artificial Sequence
  DI-SLTA-1::scFvb ::C1
MKEFTLDFSTAKTYVDSLNVIRSAIGTPLQTISSGGTSLLMIDSGIGDNLFAVDILGFDFTLGRFNNLRLIVERNNLYVTGFVNRTNNVFYRFADFSHVTFPGTTAVTLSADSSYTTLQRVAGISRTGMQINRHSLTTSYLDLMSHSGTSLTQSVARAMLRFVTVTAEALRFRQIQRGFRTTLDDLSGASYVMTAEDVDLTLNWGRLSSVLPDYHGQDSVRVGRISFGSINAILGSVALILNSHHHASAVAAEFPKPSTPPGSSGGAPDIVLTQSPASLAVSLGQRATISCRATESVEYYGTSLVQWYQQKPGQPPKLLIYAASSVDSGVPARFSGSGSGTDFSLTIHPVEEDDIAMYFCQQSRRVPYTFGGGTKLEIKGGGGSEVQLQQSGPELVKPGASVKMSCKASGYTFTSYVMHWVKQKPGQGLEWIGYVNPFNDGTKYNEMFKGKATLTSDKSSSTAYMELSSLTSEDSAVYYCARQAWGYPWGQGTLVTVSANLVPMVATV

SEQ ID NO: 86 - protein, 503 aa, Artificial Sequence
  DI-SLTA-1::scFva
MKEFTLDFSTAKTYVDSLNVIRSAIGTPLQTISSGGTSLLMIDSGIGDNLFAVDILGFDFTLGRFNNLRLIVERNNLYVTGFVNRTNNVFYRFADFSHVTFPGTTAVTLSADSSYTTLQRVAGISRTGMQINRHSLTTSYLDLMSHSGTSLTQSVARAMLRFVTVTAEALRFRQIQRGFRTTLDDLSGASYVMTAEDVDLTLNWGRLSSVLPDYHGQDSVRVGRISFGSINAILGSVALILNSHHHASAVAASPSTPPTPSPSTPPASDIQMTQSPSSLSASVGDRVTITCTGTSSDVGSYNRVSWYQQPPGTAPKLMIYEVSNRPSGVSNRFSGSKSGNTASLTISGLQAEDEADYYCSSHTTSGTYVFGTGTKLTVLGGGGSEVQLVQSGAEVKKPGASVKVSCKASGGTFSSYAISWVRQAPGQGLEWMGGIIPIFGTANYAQKFQGRVTITADESTSTAYMELSSLRSEDTAVYYCARDQGYAHAFDIWGRGTTVTVSS

SEQ ID NO: 87 - protein, 516 aa, Artificial Sequence
  DI-SLTA-1::scFva::C1
MKEFTLDFSTAKTYVDSLNVIRSAIGTPLQTISSGGTSLLMIDSGIGDNLFAVDILGFDFTLGRFNNLRLIVERNNLYVTGFVNRTNNVFYRFADFSHVTFPGTTAVTLSADSSYTTLQRVAGISRTGMQINRHSLTTSYLDLMSHSGTSLTQSVARAMLRFVTVTAEALRFRQIQRGFRTTLDDLSGASYVMTAEDVDLTLNWGRLSSVLPDYHGQDSVRVGRISFGSINAILGSVALILNSHHHASAVAASPSTPPTPSPSTPPASDIQMTQSPSSLSASVGDRVTITCTGTSSDVGSYNRVSWYQQPPGTAPKLMIYEVSNRPSGVSNRFSGSKSGNTASLTISGLQAEDEADYYCSSHTTSGTYVFGTGTKLTVLGGGGSEVQLVQSGAEVKKPGASVKVSCKASGGTFSSYAISWVRQAPGQGLEWMGGIIPIFGTANYAQKFQGRVTITADESTSTAYMELSSLRSEDTAVYYCARDQGYAHAFDIWGRGTTVTVSSHHAANLVPMVATV

SEQ ID NO: 88 - protein, 503 aa, Artificial Sequence
  inactivated DI-SLTA-1::scFva
MKEFTLDFSTAKTYVDSLNVIRSAIGTPLQTISSGGTSLLMIDSGIGDNLFAVDILGFDFTLGRFNNLRLIVERNNLYVTGFVNRTNNVFYRFADFSHVTFPGTTAVTLSADSSYTTLQRVAGISRTGMQINRHSLTTSYLDLMSHSGTSLTQSVARAMLRFVTVTADALRFRQIQRGFRTTLDDLSGASYVMTAEDVDLTLNWGRLSSVLPDYHGQDSVRVGRISFGSINAILGSVALILNSHHHASAVAASPSTPPTPSPSTPPASDIQMTQSPSSLSASVGDRVTITCTGTSSDVGSYNRVSWYQQPPGTAPKLMIYEVSNRPSGVSNRFSGSKSGNTASLTISGLQAEDEADYYCSSHTTSGTYVFGTGTKLTVLGGGGSEVQLVQSGAEVKKPGASVKVSCKASGGTFSSYAISWVRQAPGQGLEWMGGIIPIFGTANYAQKFQGRVTITADESTSTAYMELSSLRSEDTAVYYCARDQGYAHAFDIWGRGTTVTVSS

SEQ ID NO: 89 - protein, 516 aa, Artificial Sequence
  inactivated DI-SLTA-1::scFva::C1
MKEFTLDFSTAKTYVDSLNVIRSAIGTPLQTISSGGTSLLMIDSGIGDNLFAVDILGFDFTLGRFNNLRLIVERNNLYVTGFVNRTNNVFYRFADFSHVTFPGTTAVTLSADSSYTTLQRVAGISRTGMQINRHSLTTSYLDLMSHSGTSLTQSVARAMLRFVTVTADALRFRQIQRGFRTTLDDLSGASYVMTAEDVDLTLNWGRLSSVLPDYHGQDSVRVGRISFGSINAILGSVALILNSHHHASAVAASPSTPPTPSPSTPPASDIQMTQSPSSLSASVGDRVTITCTGTSSDVGSYNRVSWYQQPPGTAPKLMIYEVSNRPSGVSNRFSGSKSGNTASLTISGLQAEDEADYYCSSHTTSGTYVFGTGTKLTVLGGGGSEVQLVQSGAEVKKPGASVKVSCKASGGTFSSYAISWVRQAPGQGLEWMGGIIPIFGTANYAQKFQGRVTITADESTSTAYMELSSLRSEDTAVYYCARDQGYAHAFDIWGRGTTVTVSSHHAANLVPMVATV

SEQ ID NO: 90 - protein, 527 aa, Artificial Sequence
  DI-SLTA-1::scFva::C1::C1 variant 1
MKEFTLDFSTAKTYVDSLNVIRSAIGTPLQTISSGGTSLLMIDSGIGDNLFAVDILGFDFTLGRFNNLRLIVERNNLYVTGFVNRTNNVFYRFADFSHVTFPGTTAVTLSADSSYTTLQRVAGISRTGMQINRHSLTTSYLDLMSHSGTSLTQSVARAMLRFVTVTAEALRFRQIQRGFRTTLDDLSGASYVMTAEDVDLTLNWGRLSSVLPDYHGQDSVRVGRISFGSINAILGSVALILNSHHHASAVAASPSTPPTPSPSTPPASDIQMTQSPSSLSASVGDRVTITCTGTSSDVGSYNRVSWYQQPPGTAPKLMIYEVSNRPSGVSNRFSGSKSGNTASLTISGLQAEDEADYYCSSHTTSGTYVFGTGTKLTVLGGGGSEVQLVQSGAEVKKPGASVKVSCKASGGTFSSYAISWVRQAPGQGLEWMGGIIPIFGTANYAQKFQGRVTITADESTSTAYMELSSLRSEDTAVYYCARDQGYAHAFDIWGRGTTVTVSSHHAANLVPMVATVRRNLVPMVATV

SEQ ID NO: 91 - protein, 527 aa, Artificial Sequence
  inactivated DI-SLTA-1::scFva::C1::C1
MKEFTLDFSTAKTYVDSLNVIRSAIGTPLQTISSGGTSLLMIDSGIGDNLFAVDILGFDFTLGRFNNLRLIVERNNLYVTGFVNRTNNVFYRFADFSHVTFPGTTAVTLSADSSYTTLQRVAGISRTGMQINRHSLTTSYLDLMSHSGTSLTQSVARAMLRFVTVTADALRFRQIQRGFRTTLDDLSGASYVMTAEDVDLTLNWGRLSSVLPDYHGQDSVRVGRISFGSINAILGSVALILNSHHHASAVAASPSTPPTPSPSTPPASDIQMTQSPSSLSASVGDRVTITCTGTSSDVGSYNRVSWYQQPPGTAPKLMIYEVSNRPSGVSNRFSGSKSGNTASLTISGLQAEDEADYYCSSHTTSGTYVFGTGTKLTVLGGGGSEVQLVQSGAEVKKPGASVKVSCKASGGTFSSYAISWVRQAPGQGLEWMGGIIPIFGTANYAQKFQGRVTITADESTSTAYMELSSLRSEDTAVYYCARDQGYAHAFDIWGRGTTVTVSSHHAANLVPMVATVRRNLVPMVATV

SEQ ID NO: 92 - protein, 503 aa, Artificial Sequence
  DI-SLTA-1::scFva variant 1
MKEFTLDFSTAKTYVDSLNVIRSAIGTPLQTISSGGTSLLMIDSGIGDNLFAVDILGFDFTLGRFNNLRLIVERNNLYVTGFVNRTNNVFYRFADFSHVTFPGTTAVTLSADSSYTTLQRVAGISRTGMQINRHSLTTSYLDLMSHSGTSLTQSVARAMLRFVTVTAEALRFRQIQRGFRTTLDDLSGASYVMTAEDVDLTLNWGRLSSVLPDYHGQDSVRVGRISFGSINAILGSVALILNSHHHASAVAAEFPKPSTPPGSSGGAPDIQMTQSPSSLSASVGDRVTITCTGTSSDVGSYNRVSWYQQPPGTAPKLMIYEVSNRPSGVSNRFSGSKSGNTASLTISGLQAEDEADYYCSSHTTSGTYVFGTGTKLTVLGGGGSEVQLVQSGAEVKKPGASVKVSCKASGGTFSSYAISWVRQAPGQGLEWMGGIIPIFGTANYAQKFQGRVTITADESTSTAYMELSSLRSEDTAVYYCARDQGYAHAFDIWGRGTTVTVSS

SEQ ID NO: 93 - protein, 516 aa, Artificial Sequence
  DI-SLTA-1::scFva::C1 variant 1
MKEFTLDFSTAKTYVDSLNVIRSAIGTPLQTISSGGTSLLMIDSGIGDNLFAVDILGFDFTLGRFNNLRLIVERNNLYVTGFVNRTNNVFYRFADFSHVTFPGTTAVTLSADSSYTTLQRVAGISRTGMQINRHSLTTSYLDLMSHSGTSLTQSVARAMLRFVTVTAEALRFRQIQRGFRTTLDDLSGASYVMTAEDVDLTLNWGRLSSVLPDYHGQDSVRVGRISFGSINAILGSVALILNSHHHASAVAAEFPKPSTPPGSSGGAPDIQMTQSPSSLSASVGDRVTITCTGTSSDVGSYNRVSWYQQPPGTAPKLMIYEVSNRPSGVSNRFSGSKSGNTASLTISGLQAEDEADYYCSSHTTSGTYVFGTGTKLTVLGGGGSEVQLVQSGAEVKKPGASVKVSCKASGGTFSSYAISWVRQAPGQGLEWMGGIIPIFGTANYAQKFQGRVTITADESTSTAYMELSSLRSEDTAVYYCARDQGYAHAFDIWGRGTTVTVSSHHAANLVPMVATV

SEQ ID NO: 94 - protein, 516 aa, Artificial Sequence
  inactivated DI-SLTA-1::scFva::C1 variant 1
MKEFTLDFSTAKTYVDSLNVIRSAIGTPLQTISSGGTSLLMIDSGIGDNLFAVDILGFDFTLGRFNNLRLIVERNNLYVTGFVNRTNNVFYRFADFSHVTFPGTTAVTLSADSSYTTLQRVAGISRTGMQINRHSLTTSYLDLMSHSGTSLTQSVARAMLRFVTVTADALRFRQIQRGFRTTLDDLSGASYVMTAEDVDLTLNWGRLSSVLPDYHGQDSVRVGRISFGSINAILGSVALILNSHHHASAVAAEFPKPSTPPGSSGGAPDIQMTQSPSSLSASVGDRVTITCTGTSSDVGSYNRVSWYQQPPGTAPKLMIYEVSNRPSGVSNRFSGSKSGNTASLTISGLQAEDEADYYCSSHTTSGTYVFGTGTKLTVLGGGGSEVQLVQSGAEVKKPGASVKVSCKASGGTFSSYAISWVRQAPGQGLEWMGGIIPIFGTANYAQKFQGRVTITADESTSTAYMELSSLRSEDTAVYYCARDQGYAHAFDIWGRGTTVTVSSHHAANLVPMVATV

SEQ ID NO: 95 - protein, 527 aa, Artificial Sequence
  DI-SLTA-1::scFva::C1::C1 variant 2
MKEFTLDFSTAKTYVDSLNVIRSAIGTPLQTISSGGTSLLMIDSGIGDNLFAVDILGFDFTLGRFNNLRLIVERNNLYVTGFVNRTNNVFYRFADFSHVTFPGTTAVTLSADSSYTTLQRVAGISRTGMQINRHSLTTSYLDLMSHSGTSLTQSVARAMLRFVTVTAEALRFRQIQRGFRTTLDDLSGASYVMTAEDVDLTLNWGRLSSVLPDYHGQDSVRVGRISFGSINAILGSVALILNSHHHASAVAAEFPKPSTPPGSSGGAPDIQMTQSPSSLSASVGDRVTITCTGTSSDVGSYNRVSWYQQPPGTAPKLMIYEVSNRPSGVSNRFSGSKSGNTASLTISGLQAEDEADYYCSSHTTSGTYVFGTGTKLTVLGGGGSEVQLVQSGAEVKKPGASVKVSCKASGGTFSSYAISWVRQAPGQGLEWMGGIIPIFGTANYAQKFQGRVTITADESTSTAYMELSSLRSEDTAVYYCARDQGYAHAFDIWGRGTTVTVSSHHAANLVPMVATVRRNLVPMVATV

SEQ ID NO: 96 - protein, 527 aa, Artificial Sequence
  inactivated DI-SLTA-1::scFva::C1::C1 variant 2
MKEFTLDFSTAKTYVDSLNVIRSAIGTPLQTISSGGTSLLMIDSGIGDNLFAVDILGFDFTLGRFNNLRLIVERNNLYVTGFVNRTNNVFYRFADFSHVTFPGTTAVTLSADSSYTTLQRVAGISRTGMQINRHSLTTSYLDLMSHSGTSLTQSVARAMLRFVTVTADALRFRQIQRGFRTTLDDLSGASYVMTAEDVDLTLNWGRLSSVLPDYHGQDSVRVGRISFGSINAILGSVALILNSHHHASAVAAEFPKPSTPPGSSGGAPDIQMTQSPSSLSASVGDRVTITCTGTSSDVGSYNRVSWYQQPPGTAPKLMIYEVSNRPSGVSNRFSGSKSGNTASLTISGLQAEDEADYYCSSHTTSGTYVFGTGTKLTVLGGGGSEVQLVQSGAEVKKPGASVKVSCKASGGTFSSYAISWVRQAPGQGLEWMGGIIPIFGTANYAQKFQGRVTITADESTSTAYMELSSLRSEDTAVYYCARDQGYAHAFDIWGRGTTVTVSSHHAANLVPMVATVRRNLVPMVATV

SEQ ID NO: 97 - protein, 519 aa, Artificial Sequence
  DI-SLTA-1::scFvb ::C1 variant 1
MKEFTLDFSTAKTYVDSLNVIRSAIGTPLQTISSGGTSLLMIDSGIGDNLFAVDILGFDFTLGRFNNLRLIVERNNLYVTGFVNRTNNVFYRFADFSHVTFPGTTAVTLSADSSYTTLQRVAGISRTGMQINRHSLTTSYLDLMSHSGTSLTQSVARAMLRFVTVTAEALRFRQIQRGFRTTLDDLSGASYVMTAEDVDLTLNWGRLSSVLPDYHGQDSVRVGRISFGSINAILGSVALILNSHHHASAVAAEFPKPSTPPGSSGGAPDIVLTQSPASLAVSLGQRATISCRATESVEYYGTSLVQWYQQKPGQPPKLLIYAASSVDSGVPARFSGSGSGTDFSLTIHPVEEDDIAMYFCQQSRRVPYTFGGGTKLEIKGGGGSEVQLQQSGPELVKPGASVKMSCKASGYTFTSYVMHWVKQKPGQGLEWIGYVNPFNDGTKYNEMFKGKATLTSDKSSSTAYMELSSLTSEDSAVYYCARQAWGYPWGQGTLVTVSANLVPMVATVRRNLVPMVATV

SEQ ID NO: 98 - protein, 519 aa, Artificial Sequence
  inactivated DI-SLTA-1::scFvb ::C1 variant 1
MKEFTLDFSTAKTYVDSLNVIRSAIGTPLQTISSGGTSLLMIDSGIGDNLFAVDILGFDFTLGRFNNLRLIVERNNLYVTGFVNRTNNVFYRFADFSHVTFPGTTAVTLSADSSYTTLQRVAGISRTGMQINRHSLTTSYLDLMSHSGTSLTQSVARAMLRFVTVTADALRFRQIQRGFRTTLDDLSGASYVMTAEDVDLTLNWGRLSSVLPDYHGQDSVRVGRISFGSINAILGSVALILNSHHHASAVAAEFPKPSTPPGSSGGAPDIVLTQSPASLAVSLGQRATISCRATESVEYYGTSLVQWYQQKPGQPPKLLIYAASSVDSGVPARFSGSGSGTDFSLTIHPVEEDDIAMYFCQQSRRVPYTFGGGTKLEIKGGGGSEVQLQQSGPELVKPGASVKMSCKASGYTFTSYVMHWVKQKPGQGLEWIGYVNPFNDGTKYNEMFKGKATLTSDKSSSTAYMELSSLTSEDSAVYYCARQAWGYPWGQGTLVTVSANLVPMVATVRRNLVPMVATV

SEQ ID NO: 99 - protein, 507 aa, Artificial Sequence
  DI-SLTA-1::scFva variant 2
MKEFTLDFSTAKTYVDSLNVIRSAIGTPLQTISSGGTSLLMIDSGIGDNLFAVDILGFDFTLGRFNNLRLIVERNNLYVTGFVNRTNNVFYRFADFSHVTFPGTTAVTLSADSSYTTLQRVAGISRTGMQINRHSLTTSYLDLMSHSGTSLTQSVARAMLRFVTVTAEALRFRQIQRGFRTTLDDLSGASYVMTAEDVDLTLNWGRLSSVLPDYHGQDSVRVGRISFGSINAILGSVALILNSHHHASAVAAEFPKPSTPPGSSGGAPDIQMTQSPSSLSASVGDRVTITCTGTSSDVGSYNRVSWYQQPPGTAPKLMIYEVSNRPSGVSNRFSGSKSGNTASLTISGLQAEDEADYYCSSHTTSGTYVFGTGTKLTVLGGGGSEVQLVQSGAEVKKPGASVKVSCKASGGTFSSYAISWVRQAPGQGLEWMGGIIPIFGTANYAQKFQGRVTITADESTSTAYMELSSLRSEDTAVYYCARDQGYAHAFDIWGRGTTVTVSSHHAA

SEQ ID NO: 100 - protein, 499 aa, Artificial Sequence; identical to SEQ ID NO: 84
  DI-SLTA-1::scFvb

SEQ ID NO: 101 - protein, 528 aa, Artificial Sequence
  DI-SLTA-1::scFvb ::C1 variant D
MKEFTLDFSTAKTYVDSLNVIRSAIGTPLQTISSGGTSLLMIDSGIGDNLFAVDILGFDFTLGRFNNLRLIVERNNLYVTGFVNRTNNVFYRFADFSHVTFPGTTAVTLSADSSYTTLQRVAGISRTGMQINRHSLTTSYLDLMSHSGTSLTQSVARAMLRFVTVTAEALRFRQIQRGFRTTLDDLSGASYVMTAEDVDLTLNWGRLSSVLPDYHGQDSVRVGRISFGSINAILGSVALILNSHHHASAVAAEFPKPSTPPGSSGGAPDIVLTQSPASLAVSLGQRATISCRATESVEYYGTSLVQWYQQKPGQPPKLLIYAASSVDSGVPARFSGSGSGTDFSLTIHPVEEDDIAMYFCQQSRRVPYTFGGGTKLEIKGGGGSGGGGSGGGGSGGGGSGGGGSEVQLQQSGPELVKPGASVKMSCKASGYTFTSYVMHWVKQKPGQGLEWIGYVNPFNDGTKYNEMFKGKATLTSDKSSSTAYMELSSLTSEDSAVYYCARQAWGYPWGQGTLVTVSANLVPMVATV

SEQ ID NO: 102 - protein, 536 aa, Artificial Sequence
  DI-SLTA-1::scFva::C1 variant D
MKEFTLDFSTAKTYVDSLNVIRSAIGTPLQTISSGGTSLLMIDSGIGDNLFAVDILGFDFTLGRFNNLRLIVERNNLYVTGFVNRTNNVFYRFADFSHVTFPGTTAVTLSADSSYTTLQRVAGISRTGMQINRHSLTTSYLDLMSHSGTSLTQSVARAMLRFVTVTAEALRFRQIQRGFRTTLDDLSGASYVMTAEDVDLTLNWGRLSSVLPDYHGQDSVRVGRISFGSINAILGSVALILNSHHHASAVAASPSTPPTPSPSTPPASDIQMTQSPSSLSASVGDRVTITCTGTSSDVGSYNRVSWYQQPPGTAPKLMIYEVSNRPSGVSNRFSGSKSGNTASLTISGLQAEDEADYYCSSHTTSGTYVFGTGTKLTVLGGGGSGGGGSGGGGSGGGGSGGGGSEVQLVQSGAEVKKPGASVKVSCKASGGTFSSYAISWVRQAPGQGLEWMGGIIPIFGTANYAQKFQGRVTITADESTSTAYMELSSLRSEDTAVYYCARDQGYAHAFDIWGRGTTVTVSSHHAANLVPMVATV

SEQ ID NO: 103 - protein, 536 aa, Artificial Sequence
  inactivated DI-SLTA-1::scFva::C1 variant D
MKEFTLDFSTAKTYVDSLNVIRSAIGTPLQTISSGGTSLLMIDSGIGDNLFAVDILGFDFTLGRFNNLRLIVERNNLYVTGFVNRTNNVFYRFADFSHVTFPGTTAVTLSADSSYTTLQRVAGISRTGMQINRHSLTTSYLDLMSHSGTSLTQSVARAMLRFVTVTADALRFRQIQRGFRTTLDDLSGASYVMTAEDVDLTLNWGRLSSVLPDYHGQDSVRVGRISFGSINAILGSVALILNSHHHASAVAASPSTPPTPSPSTPPASDIQMTQSPSSLSASVGDRVTITCTGTSSDVGSYNRVSWYQQPPGTAPKLMIYEVSNRPSGVSNRFSGSKSGNTASLTISGLQAEDEADYYCSSHTTSGTYVFGTGTKLTVLGGGGSGGGGSGGGGSGGGGSGGGGSEVQLVQSGAEVKKPGASVKVSCKASGGTFSSYAISWVRQAPGQGLEWMGGIIPIFGTANYAQKFQGRVTITADESTSTAYMELSSLRSEDTAVYYCARDQGYAHAFDIWGRGTTVTVSSHHAANLVPMVATV

SEQ ID NO: 104 - protein, 547 aa, Artificial Sequence
  DI-SLTA-1::scFva::C1::C1 variant D1
MKEFTLDFSTAKTYVDSLNVIRSAIGTPLQTISSGGTSLLMIDSGIGDNLFAVDILGFDFTLGRFNNLRLIVERNNLYVTGFVNRTNNVFYRFADFSHVTFPGTTAVTLSADSSYTTLQRVAGISRTGMQINRHSLTTSYLDLMSHSGTSLTQSVARAMLRFVTVTAEALRFRQIQRGFRTTLDDLSGASYVMTAEDVDLTLNWGRLSSVLPDYHGQDSVRVGRISFGSINAILGSVALILNSHHHASAVAASPSTPPTPSPSTPPASDIQMTQSPSSLSASVGDRVTITCTGTSSDVGSYNRVSWYQQPPGTAPKLMIYEVSNRPSGVSNRFSGSKSGNTASLTISGLQAEDEADYYCSSHTTSGTYVFGTGTKLTVLGGGGSGGGGSGGGGSGGGGSGGGGSEVQLVQSGAEVKKPGASVKVSCKASGGTFSSYAISWVRQAPGQGLEWMGGIIPIFGTANYAQKFQGRVTITADESTSTAYMELSSLRSEDTAVYYCARDQGYAHAFDIWGRGTTVTVSSHHAANLVPMVATVRRNLVPMVATV

SEQ ID NO: 105 - protein, 547 aa, Artificial Sequence
  inactivated DI-SLTA-1::scFva::C1::C1 variant D1
MKEFTLDFSTAKTYVDSLNVIRSAIGTPLQTISSGGTSLLMIDSGIGDNLFAVDILGFDFTLGRFNNLRLIVERNNLYVTGFVNRTNNVFYRFADFSHVTFPGTTAVTLSADSSYTTLQRVAGISRTGMQINRHSLTTSYLDLMSHSGTSLTQSVARAMLRFVTVTADALRFRQIQRGFRTTLDDLSGASYVMTAEDVDLTLNWGRLSSVLPDYHGQDSVRVGRISFGSINAILGSVALILNSHHHASAVAASPSTPPTPSPSTPPASDIQMTQSPSSLSASVGDRVTITCTGTSSDVGSYNRVSWYQQPPGTAPKLMIYEVSNRPSGVSNRFSGSKSGNTASLTISGLQAEDEADYYCSSHTTSGTYVFGTGTKLTVLGGGGSGGGGSGGGGSGGGGSGGGGSEVQLVQSGAEVKKPGASVKVSCKASGGTFSSYAISWVRQAPGQGLEWMGGIIPIFGTANYAQKFQGRVTITADESTSTAYMELSSLRSEDTAVYYCARDQGYAHAFDIWGRGTTVTVSSHHAANLVPMVATVRRNLVPMVATV

SEQ ID NO: 106 - protein, 536 aa, Artificial Sequence
  inactivated DI-SLTA-1::scFva::C1 variant D1
MKEFTLDFSTAKTYVDSLNVIRSAIGTPLQTISSGGTSLLMIDSGIGDNLFAVDILGFDFTLGRFNNLRLIVERNNLYVTGFVNRTNNVFYRFADFSHVTFPGTTAVTLSADSSYTTLQRVAGISRTGMQINRHSLTTSYLDLMSHSGTSLTQSVARAMLRFVTVTADALRFRQIQRGFRTTLDDLSGASYVMTAEDVDLTLNWGRLSSVLPDYHGQDSVRVGRISFGSINAILGSVALILNSHHHASAVAAEFPKPSTPPGSSGGAPDIQMTQSPSSLSASVGDRVTITCTGTSSDVGSYNRVSWYQQPPGTAPKLMIYEVSNRPSGVSNRFSGSKSGNTASLTISGLQAEDEADYYCSSHTTSGTYVFGTGTKLTVLGGGGSGGGGSGGGGSGGGGSGGGGSEVQLVQSGAEVKKPGASVKVSCKASGGTFSSYAISWVRQAPGQGLEWMGGIIPIFGTANYAQKFQGRVTITADESTSTAYMELSSLRSEDTAVYYCARDQGYAHAFDIWGRGTTVTVSSHHAANLVPMVATV

SEQ ID NO: 107 - protein, 547 aa, Artificial Sequence
  DI-SLTA-1::scFva::C1::C1 variant D2
MKEFTLDFSTAKTYVDSLNVIRSAIGTPLQTISSGGTSLLMIDSGIGDNLFAVDILGFDFTLGRFNNLRLIVERNNLYVTGFVNRTNNVFYRFADFSHVTFPGTTAVTLSADSSYTTLQRVAGISRTGMQINRHSLTTSYLDLMSHSGTSLTQSVARAMLRFVTVTAEALRFRQIQRGFRTTLDDLSGASYVMTAEDVDLTLNWGRLSSVLPDYHGQDSVRVGRISFGSINAILGSVALILNSHHHASAVAAEFPKPSTPPGSSGGAPDIQMTQSPSSLSASVGDRVTITCTGTSSDVGSYNRVSWYQQPPGTAPKLMIYEVSNRPSGVSNRFSGSKSGNTASLTISGLQAEDEADYYCSSHTTSGTYVFGTGTKLTVLGGGGSGGGGSGGGGSGGGGSGGGGSEVQLVQSGAEVKKPGASVKVSCKASGGTFSSYAISWVRQAPGQGLEWMGGIIPIFGTANYAQKFQGRVTITADESTSTAYMELSSLRSEDTAVYYCARDQGYAHAFDIWGRGTTVTVSSHHAANLVPMVATVRRNLVPMVATV

SEQ ID NO: 108 - protein, 547 aa, Artificial Sequence
  inactivated DI-SLTA-1::scFva::C1::C1 Variant D2
MKEFTLDFSTAKTYVDSLNVIRSAIGTPLQTISSGGTSLLMIDSGIGDNLFAVDILGFDFTLGRFNNLRLIVERNNLYVTGFVNRTNNVFYRFADFSHVTFPGTTAVTLSADSSYTTLQRVAGISRTGMQINRHSLTTSYLDLMSHSGTSLTQSVARAMLRFVTVTADALRFRQIQRGFRTTLDDLSGASYVMTAEDVDLTLNWGRLSSVLPDYHGQDSVRVGRISFGSINAILGSVALILNSHHHASAVAAEFPKPSTPPGSSGGAPDIQMTQSPSSLSASVGDRVTITCTGTSSDVGSYNRVSWYQQPPGTAPKLMIYEVSNRPSGVSNRFSGSKSGNTASLTISGLQAEDEADYYCSSHTTSGTYVFGTGTKLTVLGGGGSGGGGSGGGGSGGGGSGGGGSEVQLVQSGAEVKKPGASVKVSCKASGGTFSSYAISWVRQAPGQGLEWMGGIIPIFGTANYAQKFQGRVTITADESTSTAYMELSSLRSEDTAVYYCARDQGYAHAFDIWGRGTTVTVSSHHAANLVPMVATVRRNLVPMVATV

SEQ ID NO: 109 - protein, 539 aa, Artificial Sequence
  DI-SLTA-1::scFvb ::C1 variant D1
MKEFTLDFSTAKTYVDSLNVIRSAIGTPLQTISSGGTSLLMIDSGIGDNLFAVDILGFDFTLGRFNNLRLIVERNNLYVTGFVNRTNNVFYRFADFSHVTFPGTTAVTLSADSSYTTLQRVAGISRTGMQINRHSLTTSYLDLMSHSGTSLTQSVARAMLRFVTVTAEALRFRQIQRGFRTTLDDLSGASYVMTAEDVDLTLNWGRLSSVLPDYHGQDSVRVGRISFGSINAILGSVALILNSHHHASAVAAEFPKPSTPPGSSGGAPDIVLTQSPASLAVSLGQRATISCRATESVEYYGTSLVQWYQQKPGQPPKLLIYAASSVDSGVPARFSGSGSGTDFSLTIHPVEEDDIAMYFCQQSRRVPYTFGGGTKLEIKGGGGSGGGGSGGGGSGGGGSGGGGSEVQLQQSGPELVKPGASVKMSCKASGYTFTSYVMHWVKQKPGQGLEWIGYVNPFNDGTKYNEMFKGKATLTSDKSSSTAYMELSSLTSEDSAVYYCARQAWGYPWGQGTLVTVSANLVPMVATVRRNLVPMVATV

SEQ ID NO: 110 - protein, 539 aa, Artificial Sequence
  inactivated DI-SLTA-1::scFvb ::C1 variant D1
MKEFTLDFSTAKTYVDSLNVIRSAIGTPLQTISSGGTSLLMIDSGIGDNLFAVDILGFDFTLGRFNNLRLIVERNNLYVTGFVNRTNNVFYRFADFSHVTFPGTTAVTLSADSSYTTLQRVAGISRTGMQINRHSLTTSYLDLMSHSGTSLTQSVARAMLRFVTVTADALRFRQIQRGFRTTLDDLSGASYVMTAEDVDLTLNWGRLSSVLPDYHGQDSVRVGRISFGSINAILGSVALILNSHHHASAVAAEFPKPSTPPGSSGGAPDIVLTQSPASLAVSLGQRATISCRATESVEYYGTSLVQWYQQKPGQPPKLLIYAASSVDSGVPARFSGSGSGTDFSLTIHPVEEDDIAMYFCQQSRRVPYTFGGGTKLEIKGGGGSGGGGSGGGGSGGGGSGGGGSEVQLQQSGPELVKPGASVKMSCKASGYTFTSYVMHWVKQKPGQGLEWIGYVNPFNDGTKYNEMFKGKATLTSDKSSSTAYMELSSLTSEDSAVYYCARQAWGYPWGQGTLVTVSANLVPMVATVRRNLVPMVATV

SEQ ID NO: 111 - protein, 4 aa, Artificial Sequence
  Endoplasmic reticulum retention/retreival signal motif
KDEL

SEQ ID NO: 112 - protein, 4 aa, Artificial Sequence
  Endoplasmic reticulum retention/retreival signal motif
HDEF

SEQ ID NO: 113 - protein, 4 aa, Artificial Sequence
  Endoplasmic reticulum retention/retreival signal motif
HDEL

SEQ ID NO: 114 - protein, 4 aa, Artificial Sequence
  Endoplasmic reticulum retention/retreival signal motif
RDEF

SEQ ID NO: 115 - protein, 4 aa, Artificial Sequence
  Endoplasmic reticulum retention/retreival signal motif
RDEL

SEQ ID NO: 116 - protein, 4 aa, Artificial Sequence
  Endoplasmic reticulum retention/retreival signal motif
WDEL

SEQ ID NO: 117 - protein, 4 aa, Artificial Sequence
  Endoplasmic reticulum retention/retreival signal motif
YDEL

SEQ ID NO: 118 - protein, 4 aa, Artificial Sequence
  Endoplasmic reticulum retention/retreival signal motif
HEEF

SEQ ID NO: 119 - protein, 4 aa, Artificial Sequence
  Endoplasmic reticulum retention/retreival signal motif
HEEL

SEQ ID NO: 120 - protein, 4 aa, Artificial Sequence
  Endoplasmic reticulum retention/retreival signal motif
KEEL

SEQ ID NO: 121 - protein, 4 aa, Artificial Sequence
  Endoplasmic reticulum retention/retreival signal motif
REEL

SEQ ID NO: 122 - protein, 4 aa, Artificial Sequence
  Endoplasmic reticulum retention/retreival signal motif
KAEL

SEQ ID NO: 123 - protein, 4 aa, Artificial Sequence
  Endoplasmic reticulum retention/retreival signal motif
KCEL

SEQ ID NO: 124 - protein, 4 aa, Artificial Sequence
  Endoplasmic reticulum retention/retreival signal motif
KFEL

SEQ ID NO: 125 - protein, 4 aa, Artificial Sequence
  Endoplasmic reticulum retention/retreival signal motif
KGEL

SEQ ID NO: 126 - protein, 4 aa, Artificial Sequence
  Endoplasmic reticulum retention/retreival signal motif
KHEL

SEQ ID NO: 127 - protein, 4 aa, Artificial Sequence
  Endoplasmic reticulum retention/retreival signal motif
KLEL

SEQ ID NO: 128 - protein, 4 aa, Artificial Sequence
  Endoplasmic reticulum retention/retreival signal motif
KNEL

SEQ ID NO: 129 - protein, 4 aa, Artificial Sequence
  Endoplasmic reticulum retention/retreival signal motif
KQEL

SEQ ID NO: 130 - protein, 4 aa, Artificial Sequence
  Endoplasmic reticulum retention/retreival signal motif
KREL

SEQ ID NO: 131 - protein, 4 aa, Artificial Sequence
  Endoplasmic reticulum retention/retreival signal motif
KSEL

SEQ ID NO: 132 - protein, 4 aa, Artificial Sequence
  Endoplasmic reticulum retention/retreival signal motif
KVEL

SEQ ID NO: 133 - protein, 4 aa, Artificial Sequence
  Endoplasmic reticulum retention/retreival signal motif
KWEL

SEQ ID NO: 134 - protein, 4 aa, Artificial Sequence
  Endoplasmic reticulum retention/retreival signal motif
KYEL

SEQ ID NO: 135 - protein, 4 aa, Artificial Sequence
  Endoplasmic reticulum retention/retreival signal motif
KEDL

SEQ ID NO: 136 - protein, 4 aa, Artificial Sequence
  Endoplasmic reticulum retention/retreival signal motif
KIEL

SEQ ID NO: 137 - protein, 4 aa, Artificial Sequence
  Endoplasmic reticulum retention/retreival signal motif
DKEL

SEQ ID NO: 138 - protein, 4 aa, Artificial Sequence
  Endoplasmic reticulum retention/retreival signal motif
FDEL

SEQ ID NO: 139 - protein, 4 aa, Artificial Sequence
  Endoplasmic reticulum retention/retreival signal motif
KDEF

SEQ ID NO: 140 - protein, 4 aa, Artificial Sequence
  Endoplasmic reticulum retention/retreival signal motif
KKEL

SEQ ID NO: 141 - protein, 4 aa, Artificial Sequence
  Endoplasmic reticulum retention/retreival signal motif
HADL

SEQ ID NO: 142 - protein, 4 aa, Artificial Sequence
  Endoplasmic reticulum retention/retreival signal motif
HAEL

SEQ ID NO: 143 - protein, 4 aa, Artificial Sequence
  Endoplasmic reticulum retention/retreival signal motif
HIEL

SEQ ID NO: 144 - protein, 4 aa, Artificial Sequence
  Endoplasmic reticulum retention/retreival signal motif
HNEL

SEQ ID NO: 145 - protein, 4 aa, Artificial Sequence
  Endoplasmic reticulum retention/retreival signal motif
HTEL

SEQ ID NO: 146 - protein, 4 aa, Artificial Sequence
  Endoplasmic reticulum retention/retreival signal motif
KTEL

SEQ ID NO: 147 - protein, 4 aa, Artificial Sequence
  Endoplasmic reticulum retention/retreival signal motif
HVEL

SEQ ID NO: 148 - protein, 4 aa, Artificial Sequence
  Endoplasmic reticulum retention/retreival signal motif
NDEL

SEQ ID NO: 149 - protein, 4 aa, Artificial Sequence
  Endoplasmic reticulum retention/retreival signal motif
QDEL

SEQ ID NO: 150 - protein, 4 aa, Artificial Sequence
  Endoplasmic reticulum retention/retreival signal motif
REDL

SEQ ID NO: 151 - protein, 4 aa, Artificial Sequence
  Endoplasmic reticulum retention/retreival signal motif
RNEL

SEQ ID NO: 152 - protein, 4 aa, Artificial Sequence
  Endoplasmic reticulum retention/retreival signal motif
RTDL

SEQ ID NO: 153 - protein, 4 aa, Artificial Sequence
  Endoplasmic reticulum retention/retreival signal motif
RTEL

SEQ ID NO: 154 - protein, 4 aa, Artificial Sequence
  Endoplasmic reticulum retention/retreival signal motif
SDEL

SEQ ID NO: 155 - protein, 4 aa, Artificial Sequence
  Endoplasmic reticulum retention/retreival signal motif
TDEL

SEQ ID NO: 156 - protein, 4 aa, Artificial Sequence
  Endoplasmic reticulum retention/retreival signal motif
SKEL

SEQ ID NO: 157 - protein, 4 aa, Artificial Sequence
  Endoplasmic reticulum retention/retreival signal motif
STEL

SEQ ID NO: 158 - protein, 4 aa, Artificial Sequence
  Endoplasmic reticulum retention/retreival signal motif
EDEL

SEQ ID NO: 159 - protein, 4 aa, Artificial Sequence
  furin cleavage motif
  misc_feature (1)..(1): Xaa is Arg or Tyr
  misc_feature (1)..(3): Xaa is any amino acid
XXXR

SEQ ID NO: 160 - protein, 4 aa, Artificial Sequence
  furin cleavage motif
  misc_feature (2)..(3): Xaa is any amino acid
RXXR

SEQ ID NO: 161 - protein, 4 aa, Artificial Sequence
  furin cleavage motif
  misc_feature (2)..(2): Xaa is any amino acid
  misc_feature (3)..(3): Xaa is Arg, Lys or any amino acid
RXXR

SEQ ID NO: 162 - protein, 5 aa, Artificial Sequence
  furin cleavage motif
  misc_feature (2)..(2): Xaa is Arg or Tyr
  misc_feature (3)..(4): Xaa is any amino acid
SXXXR

SEQ ID NO: 163 - protein, 4 aa, Artificial Sequence
  Inhibitor of furin
RVKR

SEQ ID NO: 164 - protein, 4 aa, Artificial Sequence
  furin cleavage motif
  misc_feature (2)..(2): Xaa is any amino acid
  misc_feature (3)..(3): Xaa is Lys or Arg
RXXR

SEQ ID NO: 165 - protein, 28 aa, Artificial Sequence
  Linker
AMGRSGGGCAGNRVGSSLSCGGLNLQAM

SEQ ID NO: 166 - protein, 533 aa, Artificial Sequence
  PD-L1 binding molecule
MKEFTLDFSTAKTYVDSLNVIRSAIGTPLQTISSGGTSLLMIDSGCGDNLFAVDILGFDFTLGRFNNLRLIVERNNLYVTGFVNRTNNVFYRFADFSHVTFPGTTAVTLSADSSYTTLQRVAGISRTGMQINRHSLTTSYLDLMSHSGTSLTQSVARAMLRFVTVTAEALRFRQIQRGFRTTLDDLSGASYVMTAEDVDLTLNWGRLSSVLPDYHGQDSVRVGRISFGSINAILGSVALILNSHHHASAVAASPSTPPTPSPSTPPASDIQMTQSPSSLSASVGDRVTITCTGTSSDVGSYNRVSWYQQPPGTAPKLMIYEVSNRPSGVSNRFSGSKSGNTASLTISGLQAEDEADYYCSSHTTSGTYVFGTGTKLTVLGGGGSEVQLVQSGAEVKKPGASVKVSCKASGGTFSSYAISWVRQAPGQGLEWMGGIIPIFGTANYAQKFQGRVTITADESTSTAYMELSSLRSEDTAVYYCARDQGYAHAFDIWGRGTTVTVSSHHAANLVPMVATVRRNLVPMVATVRRNLVP

SEQ ID NO: 167 - protein, 6 aa, Artificial Sequence
  Linker
ASGGPE

SEQ ID NO: 168 - protein, 54 aa, Artificial Sequence
  linker sequence
  misc_feature (5)..(6): Up to 2 residues may be absent
  misc_feature (7)..(12): May be absent
  misc_feature (10)..(11): Up to 2 residues may be absent
  misc_feature (13)..(17): May be absent
  misc_feature (15)..(16): Up to 2 residues may be absent
  misc_feature (18)..(22): May be absent
  misc_feature (20)..(21): Up to 2 residues may be absent
  misc_feature (23)..(27): May be absent
  misc_feature (25)..(26): Up to 2 residues may be absent
  misc_feature (28)..(32): May be absent
  misc_feature (30)..(31): Up to 2 residues may be absent
  misc_feature (33)..(37): May be absent
  misc_feature (35)..(36): Up to 2 residues may be absent
  misc_feature (38)..(42): May be absent
  misc_feature (40)..(41): Up to 2 residues may be absent
  misc_feature (43)..(47): May be absent
  misc_feature (45)..(46): Up to 2 residues may be absent
  misc_feature (48)..(52): May be absent
  misc_feature (50)..(51): Up to 2 residues may be absent
AMGGGGSGGGGSGGGGSGGGGSGGGGSGGGGSGGGGSGGGGSGGGGSGGGGSAM

SEQ ID NO: 169 - protein, 30 aa, Artificial Sequence
  linker sequence
  misc_feature (2)..(30): Up to 29 may be absent
GGGGGGGGGGGGGGGGGGGGGGGGGGGGGG

SEQ ID NO: 170 - protein, 210 aa, Artificial Sequence
  linker sequence
  misc_feature (2)..(6): Up to 5 residues may be absent
  misc_feature (8)..(14): May be absent
  misc_feature (9)..(13): Up to 5 residues may be absent
  misc_feature (15)..(21): May be absent
  misc_feature (16)..(20): Up to 5 residues may be absent
  misc_feature (22)..(28): May be absent
  misc_feature (23)..(27): Up to 5 residues may be absent
  misc_feature (29)..(35): May be absent
  misc_feature (30)..(34): Up to 5 residues may be absent
  misc_feature (36)..(42): May be absent
  misc_feature (37)..(41): Up to 5 residues may be absent
  misc_feature (42)..(48): Up to 5 residues may be absent
  misc_feature (43)..(49): May be absent
  misc_feature (50)..(56): May be absent
  misc_feature (51)..(55): Up to 5 residues may be absent
  misc_feature (57)..(63): May be absent
  misc_feature (58)..(61): Up to 5 residues may be absent
  misc_feature (64)..(70): May be absent
  misc_feature (65)..(69): Up to 5 residues may be absent
  misc_feature (71)..(77): May be absent
  misc_feature (72)..(76): Up to 5 residues may be absent
  misc_feature (78)..(84): May be absent
  misc_feature (79)..(83): Up to 5 residues may be absent
  misc_feature (85)..(91): May be absent
  misc_feature (86)..(90): Up to 5 residues may be absent
  misc_feature (92)..(98): May be absent
  misc_feature (93)..(97): Up to 5 residues may be absent
  misc_feature (99)..(105): May be absent
  misc_feature (100)..(104): Up to 5 residues may be absent
  misc_feature (106)..(112): May be absent
  misc_feature (107)..(111): Up to 5 residues may be absent
  misc_feature (113)..(119): May be absent
  misc_feature (114)..(118): Up to 5 residues may be absent
  misc_feature (120)..(126): May be absent
  misc_feature (121)..(125): Up to 5 residues may be absent
  misc_feature (127)..(133): May be absent
  misc_feature (128)..(132): Up to 5 residues may be absent
  misc_feature (134)..(140): May be absent
  misc_feature (135)..(139): Up to 5 residues may be absent
  misc_feature (141)..(147): May be absent
  misc_feature (142)..(146): Up to 5 residues may be absent
  misc_feature (148)..(154): May be absent
  misc_feature (149)..(153): Up to 5 residues may be absent
  misc_feature (155)..(161): May be absent
  misc_feature (156)..(160): Up to 5 residues may be absent
  misc_feature (162)..(168): May be absent
  misc_feature (163)..(167): Up to 5 residues may be absent
  misc_feature (169)..(175): May be absent
  misc_feature (170)..(174): Up to 5 residues may be absent
  misc_feature (176)..(182): May be absent
  misc_feature (177)..(181): Up to 5 residues may be absent
  misc_feature (183)..(189): May be absent
  misc_feature (184)..(188): Up to 5 residues may be absent
  misc_feature (190)..(196): May be absent
  misc_feature (191)..(195): Up to 5 residues may be absent
  misc_feature (197)..(203): May be absent
  misc_feature (198)..(202): Up to 5 residues may be absent
  misc_feature (204)..(210): May be absent
  misc_feature (205)..(209): Up to 5 residues may be absent
SSSSSSGSSSSSSGSSSSSSGSSSSSSGSSSSSSGSSSSSSGSSSSSSGSSSSSSGSSSSSSGSSSSSSGSSSSSSGSSSSSSGSSSSSSGSSSSSSGSSSSSSGSSSSSSGSSSSSSGSSSSSSGSSSSSSGSSSSSSGSSSSSSGSSSSSSGSSSSSSGSSSSSSGSSSSSSGSSSSSSGSSSSSSGSSSSSSGSSSSSSGSSSSSSG

SEQ ID NO: 171 - protein, 150 aa, Artificial Sequence
  linker sequence
  misc_feature (6)..(10): May be absent
  misc_feature (11)..(15): May be absent
  misc_feature (16)..(20): May be absent
  misc_feature (21)..(25): May be absent
  misc_feature (26)..(30): May be absent
  misc_feature (31)..(35): May be absent
  misc_feature (36)..(40): May be absent
  misc_feature (41)..(45): May be absent
  misc_feature (46)..(50): May be absent
  misc_feature (51)..(55): May be absent
  misc_feature (56)..(60): May be absent
  misc_feature (61)..(65): May be absent
  misc_feature (66)..(70): May be absent
  misc_feature (71)..(75): May be absent
  misc_feature (76)..(80): May be absent
  misc_feature (81)..(85): May be absent
  misc_feature (86)..(90): May be absent
  misc_feature (91)..(95): May be absent
  misc_feature (96)..(100): May be absent
  misc_feature (101)..(105): May be absent
  misc_feature (106)..(110): May be absent
  misc_feature (111)..(115): May be absent
  misc_feature (116)..(120): May be absent
  misc_feature (121)..(125): May be absent
  misc_feature (126)..(130): May be absent
  misc_feature (131)..(135): May be absent
  misc_feature (136)..(140): May be absent
  misc_feature (141)..(145): May be absent
  misc_feature (146)..(150): May be absent
GGGGSGGGGSGGGGSGGGGSGGGGSGGGGSGGGGSGGGGSGGGGSGGGGSGGGGSGGGGSGGGGSGGGGSGGGGSGGGGSGGGGSGGGGSGGGGSGGGGSGGGGSGGGGSGGGGSGGGGSGGGGSGGGGSGGGGSGGGGSGGGGSGGGGS

SEQ ID NO: 172 - protein, 30 aa, Artificial Sequence; identical to SEQ ID NO: 169
  linker sequence
  misc_feature (2)..(30): Up to 29 may be absent

SEQ ID NO: 173 - protein, 12 aa, Artificial Sequence
  Linker
GKSSGSGSESKS

SEQ ID NO: 174 - protein, 14 aa, Artificial Sequence
  Linker
EGKSSGSGSESKEF

SEQ ID NO: 175 - protein, 14 aa, Artificial Sequence
  Linker
GSTSGSGKSSEGKG

SEQ ID NO: 176 - protein, 18 aa, Artificial Sequence
  Linker
GSTSGSGKSSEGSGSTKG

SEQ ID NO: 177 - protein, 18 aa, Artificial Sequence
  Linker
GSTSGSGKPGSGEGSTKG

SEQ ID NO: 178 - protein, 5 aa, Artificial Sequence
  Linker
SRSSG

SEQ ID NO: 179 - protein, 5 aa, Artificial Sequence
  Linker
SGSSC

SEQ ID NO: 180 - protein, 20 aa, Artificial Sequence
  Linker
GGGGSGGGGSGGGGSGGGGS

SEQ ID NO: 181 - protein, 4 aa, Artificial Sequence
  Linker
GGGS

SEQ ID NO: 182 - protein, 5 aa, Artificial Sequence
  Linker
GGGGS

SEQ ID NO: 183 - protein, 8 aa, Artificial Sequence
  Linker
GGGGSGGG

SEQ ID NO: 184 - protein, 7 aa, Artificial Sequence
  Linker
GGSGGGG

SEQ ID NO: 185 - protein, 18 aa, Artificial Sequence
  Linker
GSTSGGGSGGGSGGGGSS

SEQ ID NO: 186 - protein, 18 aa, Artificial Sequence
  Linker
GSTSGSGKPGSSEGSTKG

SEQ ID NO: 187 - protein, 4 aa, Artificial Sequence
  Cleavable spacer
HHAA

SEQ ID NO: 188 - protein, 549 aa, Artificial Sequence
  PD-L1 Targeting Molecule
MKEFTLDFSTAKTYVDSLNVIRSAIGTPLQTISSGGTSLLMIDSGIGDNLFAVDILGFDFTLGRFNNLRLIVERNNLYVTGFVNRTNNVFYRFADFSHVTFPGTTAVTLSADSSYTTLQRVAGISRTGMQINRHSLTTSYLDLMSHSGTSLTQSVARAMLRFVTVTAEALRFRQIQRGFRTTLDDLSGASYVMTAEDVDLTLNWGRLSSVLPDYHGQDSVRVGRISFGSINAILGSVALILNSHHHASAVAASPSTPPTPSPSTPPASEVQLVQSGAEVKKPGASVKVSCKASGGTFSSYAISWVRQAPGQGLEWMGGIIPIFGTANYAQKFQGRVTITADESTSTAYMELSSLRSEDTAVYYCARDQGYAHAFDIWGRGTTVTVSSGGGGSGGGGSGGGGSGGGGSGGGGSDIQMTQSPSSLSASVGDRVTITCTGTSSDVGSYNRVSWYQQPPGTAPKLMIYEVSNRPSGVSNRFSGSKSGNTASLTISGLQAEDEADYYCSSHTTSGTYVFGTGTKLTVLNLVPMVATVRRNLVPMVATVRRNLVP

SEQ ID NO: 189 - protein, 536 aa, Artificial Sequence
  PD-L1 Targeting Molecule
MKEFTLDFSTAKTYVDSLNVIRSAIGTPLQTISSGGTSLLMIDSGIGDNLFAVDILGFDFTLGRFNNLRLIVERNNLYVTGFVNRTNNVFYRFADFSHVTFPGTTAVTLSADSSYTTLQRVAGISRTGMQINRHSLTTSYLDLMSHSGTSLTQSVARAMLRFVTVTAEALRFRQIQRGFRTTLDDLSGASYVMTAEDVDLTLNWGRLSSVLPDYHGQDSVRVGRISFGSINAILGSVALILNSHHHASAVAASPSTPPTPSPSTPPASEVQLVQSGAEVKKPGASVKVSCKASGGTFSSYAISWVRQAPGQGLEWMGGIIPIFGTANYAQKFQGRVTITADESTSTAYMELSSLRSEDTAVYYCARDQGYAHAFDIWGRGTTVTVSSGGGGSGGGGSGGGGSGGGGSGGGGSDIQMTQSPSSLSASVGDRVTITCTGTSSDVGSYNRVSWYQQPPGTAPKLMIYEVSNRPSGVSNRFSGSKSGNTASLTISGLQAEDEADYYCSSHTTSGTYVFGTGTKLTVLHHAANLVPMVATV

SEQ ID NO: 190 - protein, 560 aa, Artificial Sequence
  PD-L1 Targeting Molecule
MKEFTLDFSTAKTYVDSLNVIRSAIGTPLQTISSGGTSLLMIDSGIGDNLFAVDILGFDFTLGRFNNLRLIVERNNLYVTGFVNRTNNVFYRFADFSHVTFPGTTAVTLSADSSYTTLQRVAGISRTGMQINRHSLTTSYLDLMSHSGTSLTQSVARAMLRFVTVTAEALRFRQIQRGFRTTLDDLSGASYVMTAEDVDLTLNWGRLSSVLPDYHGQDSVRVGRISFGSINAILGSVALILNSHHHASAVAASPSTPPTPSPSTPPASEVQLVQSGAEVKKPGASVKVSCKASGGTFSSYAISWVRQAPGQGLEWMGGIIPIFGTANYAQKFQGRVTITADESTSTAYMELSSLRSEDTAVYYCARDQGYAHAFDIWGRGTTVTVSSGGGGSGGGGSGGGGSGGGGSGGGGSDIQMTQSPSSLSASVGDRVTITCTGTSSDVGSYNRVSWYQQPPGTAPKLMIYEVSNRPSGVSNRFSGSKSGNTASLTISGLQAEDEADYYCSSHTTSGTYVFGTGTKLTVLHHAANLVPMVATVHHLNLVPMVATVHHANLVPMVATV

SEQ ID NO: 191 - protein, 512 aa, Artificial Sequence
  PD-L1 Targeting Molecule
MKEFTLDFSTAKTYVDSLNVIRSAIGTPLQTISSGGTSLLMIDSGIGDNLFAVDILGFDFTLGRFNNLRLIVERNNLYVTGFVNRTNNVFYRFADFSHVTFPGTTAVTLSADSSYTTLQRVAGISRTGMQINRHSLTTSYLDLMSHSGTSLTQSVARAMLRFVTVTAEALRFRQIQRGFRTTLDDLSGASYVMTAEDVDLTLNWGRLSSVLPDYHGQDSVRVGRISFGSINAILGSVALILNSHHHASAVAASPSTPPTPSPSTPPASDIQMTQSPSSLSASVGDRVTITCTGTSSDVGSYNRVSWYQQPPGTAPKLMIYEVSNRPSGVSNRFSGSKSGNTASLTISGLQAEDEADYYCSSHTTSGTYVFGTGTKLTVLGGGGSEVQLVQSGAEVKKPGASVKVSCKASGGTFSSYAISWVRQAPGQGLEWMGGIIPIFGTANYAQKFQGRVTITADESTSTAYMELSSLRSEDTAVYYCARDQGYAHAFDIWGRGTTVTVSSNLVPMVATV

SEQ ID NO: 192 - protein, 512 aa, Artificial Sequence
  PD-L1 Targeting Molecule
MKEFTLDFSTAKTYVDSLNVIRSAIGTPLQTISSGGTSLLMIDSGCGDNLFAVDILGFDFTLGRFNNLRLIVERNNLYVTGFVNRTNNVFYRFADFSHVTFPGTTAVTLSADSSYTTLQRVAGISRTGMQINRHSLTTSYLDLMSHSGTSLTQSVARAMLRFVTVTAEALRFRQIQRGFRTTLDDLSGASYVMTAEDVDLTLNWGRLSSVLPDYHGQDSVRVGRISFGSINAILGSVALILNSHHHASAVAASPSTPPTPSPSTPPASDIQMTQSPSSLSASVGDRVTITCTGTSSDVGSYNRVSWYQQPPGTAPKLMIYEVSNRPSGVSNRFSGSKSGNTASLTISGLQAEDEADYYCSSHTTSGTYVFGTGTKLTVLGGGGSEVQLVQSGAEVKKPGASVKVSCKASGGTFSSYAISWVRQAPGQGLEWMGGIIPIFGTANYAQKFQGRVTITADESTSTAYMELSSLRSEDTAVYYCARDQGYAHAFDIWGRGTTVTVSSNLVPMVATV

SEQ ID NO: 193 - protein, 503 aa, Artificial Sequence
  PD-L1 Targeting Molecule
MKEFTLDFSTAKTYVDSLNVIRSAIGTPLQTISSGGTSLLMIDSGCGDNLFAVDILGFDFTLGRFNNLRLIVERNNLYVTGFVNRTNNVFYRFADFSHVTFPGTTAVTLSADSSYTTLQRVAGISRTGMQINRHSLTTSYLDLMSHSGTSLTQSVARAMLRFVTVTAEALRFRQIQRGFRTTLDDLSGASYVMTAEDVDLTLNWGRLSSVLPDYHGQDSVRVGRISFGSINAILGSVALILNSHHHASAVAASPSTPPTPSPSTPPASDIQMTQSPSSLSASVGDRVTITCTGTSSDVGSYNRVSWYQQPPGTAPKLMIYEVSNRPSGVSNRFSGSKSGNTASLTISGLQAEDEADYYCSSHTTSGTYVFGTGTKLTVLGGGGSEVQLVQSGAEVKKPGASVKVSCKASGGTFSSYAISWVRQAPGQGLEWMGGIIPIFGTANYAQKFQGRVTITADESTSTAYMELSSLRSEDTAVYYCARDQGYAHAFDIWGRGTTVTVSS

SEQ ID NO: 194 - protein, 549 aa, Artificial Sequence
  PD-L1 Targeting Molecule
MKEFTLDFSTAKTYVDSLNVIRSAIGTPLQTISSGGTSLLMIDSGIGDNLFAVDILGFDFTLGRFNNLRLIVERNNLYVTGFVNRTNNVFYRFADFSHVTFPGTTAVTLSADSSYTTLQRVAGISRTGMQINRHSLTTSYLDLMSHSGTSLTQSVARAMLRFVTVTAEALRFRQIQRGFRTTLDDLSGASYVMTAEDVDLTLNWGRLSSVLPDYHGQDSVRVGRISFGSINAILGSVALILNSHHHASAVAASPSTPPTPSPSTPPASDIQMTQSPSSLSASVGDRVTITCTGTSSDVGSYNRVSWYQQPPGTAPKLMIYEVSNRPSGVSNRFSGSKSGNTASLTISGLQAEDEADYYCSSHTTSGTYVFGTGTKLTVLGGGGSGGGGSGGGGSGGGGSGGGGSEVQLVQSGAEVKKPGASVKVSCKASGGTFSSYAISWVRQAPGQGLEWMGGIIPIFGTANYAQKFQGRVTITADESTSTAYMELSSLRSEDTAVYYCARDQGYAHAFDIWGRGTTVTVSSNLVPMVATVRRNLVPMVATVRRNLVP

SEQ ID NO: 195 - protein, 536 aa, Artificial Sequence; identical to SEQ ID NO: 102
  PD-L1 Targeting Molecule

SEQ ID NO: 196 - protein, 512 aa, Artificial Sequence
  PD-L1 Targeting Molecule
MKEFTLDFSTAKTYVDSLNVIRSAIGTPLQTISSGGTSLLMIDSGIGDNLFAVDILGFDFTLGRFNNLRLIVERNNLYVTGFVNRTNNVFYRFADFSHVTFPGTTAVTLSADSSYTTLQRVAGISRTGMQINRHSLTTSYLDLMSHSGTSLTQSVARAMLRFVTVTAEALRFRQIQRGFRTTLDDLSGASYVMTAEDVDLTLNWGRLSSVLPDYHGQDSVRVGRISFGSINAILGSVALILNSHHHASAVAASPSTPPTPSPSTPPASEVQLVQSGAEVKKPGASVKVSCKASGGTFSSYAISWVRQAPGQGLEWMGGIIPIFGTANYAQKFQGRVTITADESTSTAYMELSSLRSEDTAVYYCARDQGYAHAFDIWGRGTTVTVSSGGGGSDIQMTQSPSSLSASVGDRVTITCTGTSSDVGSYNRVSWYQQPPGTAPKLMIYEVSNRPSGVSNRFSGSKSGNTASLTISGLQAEDEADYYCSSHTTSGTYVFGTGTKLTVLNLVPMVATV

SEQ ID NO: 197 - protein, 503 aa, Artificial Sequence
  PD-L1 Targeting Molecule
MKEFTLDFSTAKTYVDSLNVIRSAIGTPLQTISSGGTSLLMIDSGIGDNLFAVDILGFDFTLGRFNNLRLIVERNNLYVTGFVNRTNNVFYRFADFSHVTFPGTTAVTLSADSSYTTLQRVAGISRTGMQINRHSLTTSYLDLMSHSGTSLTQSVARAMLRFVTVTAEALRFRQIQRGFRTTLDDLSGASYVMTAEDVDLTLNWGRLSSVLPDYHGQDSVRVGRISFGSINAILGSVALILNSHHHASAVAASPSTPPTPSPSTPPASEVQLVQSGAEVKKPGASVKVSCKASGGTFSSYAISWVRQAPGQGLEWMGGIIPIFGTANYAQKFQGRVTITADESTSTAYMELSSLRSEDTAVYYCARDQGYAHAFDIWGRGTTVTVSSGGGGSDIQMTQSPSSLSASVGDRVTITCTGTSSDVGSYNRVSWYQQPPGTAPKLMIYEVSNRPSGVSNRFSGSKSGNTASLTISGLQAEDEADYYCSSHTTSGTYVFGTGTKLTVL

SEQ ID NO: 198 - protein, 516 aa, Artificial Sequence; identical to SEQ ID NO: 87
  PD-L1 Targeting Molecule

SEQ ID NO: 199 - protein, 520 aa, Artificial Sequence
  PD-L1 Targeting Molecule
MKEFTLDFSTAKTYVDSLNVIRSAIGTPLQTISSGGTSLLMIDSGIGDNLFAVDILGFDFTLGRFNNLRLIVERNNLYVTGFVNRTNNVFYRFADFSHVTFPGTTAVTLSADSSYTTLQRVAGISRTGMQINRHSLTTSYLDLMSHSGTSLTQSVARAMLRFVTVTAEALRFRQIQRGFRTTLDDLSGASYVMTAEDVDLTLNWGRLSSVLPDYHGQDSVRVGRISFGSINAILGSVALILNSHHHASAVAASPSTPPTPSPSTPPASDIQMTQSPSSLSASVGDRVTITCTGTSSDVGSYNRVSWYQQPPGTAPKLMIYEVSNRPSGVSNRFSGSKSGNTASLTISGLQAEDEADYYCSSHTTSGTYVFGTGTKLTVLGGGGSEVQLVQSGAEVKKPGASVKVSCKASGGTFSSYAISWVRQAPGQGLEWMGGIIPIFGTANYAQKFQGRVTITADESTSTAYMELSSLRSEDTAVYYCARDQGYAHAFDIWGRGTTVTVSSHHHHHHAANLVPMVATV

SEQ ID NO: 200 - protein, 516 aa, Artificial Sequence
  PD-L1 Targeting Molecule
MKEFTLDFSTAKTYVDSLNVIRSAIGTPLQTISSGGTSLLMIDSGIGDNLFAVDILGFDFTLGRFNNLRLIVERNNLYVTGFVNRTNNVFYRFADFSHVTFPGTTAVTLSADSSYTTLQRVAGISRTGMQINRHSLTTSYLDLMSHSGTSLTQSVARAMLRFVTVTAEALRFRQIQRGFRTTLDDLSGASYVMTAEDVDLTLNWGRLSSVLPDYHGQDSVRVGRISFGSINAILGSVALILNSHHHASAVAASPSTPPTPSPSTPPASEVQLVQSGAEVKKPGASVKVSCKASGGTFSSYAISWVRQAPGQGLEWMGGIIPIFGTANYAQKFQGRVTITADESTSTAYMELSSLRSEDTAVYYCARDQGYAHAFDIWGRGTTVTVSSGGGGSDIQMTQSPSSLSASVGDRVTITCTGTSSDVGSYNRVSWYQQPPGTAPKLMIYEVSNRPSGVSNRFSGSKSGNTASLTISGLQAEDEADYYCSSHTTSGTYVFGTGTKLTVLHHAANLVPMVATV

SEQ ID NO: 201 - protein, 520 aa, Artificial Sequence
  PD-L1 Targeting Molecule
MKEFTLDFSTAKTYVDSLNVIRSAIGTPLQTISSGGTSLLMIDSGIGDNLFAVDILGFDFTLGRFNNLRLIVERNNLYVTGFVNRTNNVFYRFADFSHVTFPGTTAVTLSADSSYTTLQRVAGISRTGMQINRHSLTTSYLDLMSHSGTSLTQSVARAMLRFVTVTAEALRFRQIQRGFRTTLDDLSGASYVMTAEDVDLTLNWGRLSSVLPDYHGQDSVRVGRISFGSINAILGSVALILNSHHHASAVAASPSTPPTPSPSTPPASEVQLVQSGAEVKKPGASVKVSCKASGGTFSSYAISWVRQAPGQGLEWMGGIIPIFGTANYAQKFQGRVTITADESTSTAYMELSSLRSEDTAVYYCARDQGYAHAFDIWGRGTTVTVSSGGGGSDIQMTQSPSSLSASVGDRVTITCTGTSSDVGSYNRVSWYQQPPGTAPKLMIYEVSNRPSGVSNRFSGSKSGNTASLTISGLQAEDEADYYCSSHTTSGTYVFGTGTKLTVLHHHHHHAANLVPMVATV

SEQ ID NO: 202 - protein, 518 aa, Artificial Sequence
  PD-L1 Targeting Molecule
MKEFTLDFSTAKTYVDSLNVIRSAIGTPLQTISSGGTSLLMIDSGIGDNLFAVDILGFDFTLGRFNNLRLIVERNNLYVTGFVNRTNNVFYRFADFSHVTFPGTTAVTLSADSSYTTLQRVAGISRTGMQINRHSLTTSYLDLMSHSGTSLTQSVARAMLRFVTVTAEALRFRQIQRGFRTTLDDLSGASYVMTAEDVDLTLNWGRLSSVLPDYHGQDSVRVGRISFGSINAILGSVALILNSHHHASAVAASPSTPPTPSPSTPPASDIQMTQSPSSLSASVGDRVTITCTGTSSDVGSYNRVSWYQQPPGTAPKLMIYEVSNRPSGVSNRFSGSKSGNTASLTISGLQAEDEADYYCSSHTTSGTYVFGTGTKLTVLGGGGSEVQLVQSGAEVKKPGASVKVSCKASGGTFSSYAISWVRQAPGQGLEWMGGIIPIFGTANYAQKFQGRVTITADESTSTAYMELSSLRSEDTAVYYCARDQGYAHAFDIWGRGTTVTVSSNLVPMVATVRRNLVP

SEQ ID NO: 203 - protein, 523 aa, Artificial Sequence
  PD-L1 Targeting Molecule
MKEFTLDFSTAKTYVDSLNVIRSAIGTPLQTISSGGTSLLMIDSGIGDNLFAVDILGFDFTLGRFNNLRLIVERNNLYVTGFVNRTNNVFYRFADFSHVTFPGTTAVTLSADSSYTTLQRVAGISRTGMQINRHSLTTSYLDLMSHSGTSLTQSVARAMLRFVTVTAEALRFRQIQRGFRTTLDDLSGASYVMTAEDVDLTLNWGRLSSVLPDYHGQDSVRVGRISFGSINAILGSVALILNSHHHASAVAASPSTPPTPSPSTPPASDIQMTQSPSSLSASVGDRVTITCTGTSSDVGSYNRVSWYQQPPGTAPKLMIYEVSNRPSGVSNRFSGSKSGNTASLTISGLQAEDEADYYCSSHTTSGTYVFGTGTKLTVLGGGGSEVQLVQSGAEVKKPGASVKVSCKASGGTFSSYAISWVRQAPGQGLEWMGGIIPIFGTANYAQKFQGRVTITADESTSTAYMELSSLRSEDTAVYYCARDQGYAHAFDIWGRGTTVTVSSNLVPMVATVRRNLVPMVATV

SEQ ID NO: 204 - protein, 529 aa, Artificial Sequence
  PD-L1 Targeting Molecule
MKEFTLDFSTAKTYVDSLNVIRSAIGTPLQTISSGGTSLLMIDSGIGDNLFAVDILGFDFTLGRFNNLRLIVERNNLYVTGFVNRTNNVFYRFADFSHVTFPGTTAVTLSADSSYTTLQRVAGISRTGMQINRHSLTTSYLDLMSHSGTSLTQSVARAMLRFVTVTAEALRFRQIQRGFRTTLDDLSGASYVMTAEDVDLTLNWGRLSSVLPDYHGQDSVRVGRISFGSINAILGSVALILNSHHHASAVAASPSTPPTPSPSTPPASDIQMTQSPSSLSASVGDRVTITCTGTSSDVGSYNRVSWYQQPPGTAPKLMIYEVSNRPSGVSNRFSGSKSGNTASLTISGLQAEDEADYYCSSHTTSGTYVFGTGTKLTVLGGGGSEVQLVQSGAEVKKPGASVKVSCKASGGTFSSYAISWVRQAPGQGLEWMGGIIPIFGTANYAQKFQGRVTITADESTSTAYMELSSLRSEDTAVYYCARDQGYAHAFDIWGRGTTVTVSSNLVPMVATVRRNLVPMVATVRRNLVP

SEQ ID NO: 205 - protein, 525 aa, Artificial Sequence
  PD-L1 Targeting Molecule
MKEFTLDFSTAKTYVDSLNVIRSAIGTPLQTISSGGTSLLMIDSGIGDNLFAVDILGFDFTLGRFNNLRLIVERNNLYVTGFVNRTNNVFYRFADFSHVTFPGTTAVTLSADSSYTTLQRVAGISRTGMQINRHSLTTSYLDLMSHSGTSLTQSVARAMLRFVTVTAEALRFRQIQRGFRTTLDDLSGASYVMTAEDVDLTLNWGRLSSVLPDYHGQDSVRVGRISFGSINAILGSVALILNSHHHASAVAASPSTPPTPSPSTPPASDIQMTQSPSSLSASVGDRVTITCTGTSSDVGSYNRVSWYQQPPGTAPKLMIYEVSNRPSGVSNRFSGSKSGNTASLTISGLQAEDEADYYCSSHTTSGTYVFGTGTKLTVLGGGGSEVQLVQSGAEVKKPGASVKVSCKASGGTFSSYAISWVRQAPGQGLEWMGGIIPIFGTANYAQKFQGRVTITADESTSTAYMELSSLRSEDTAVYYCARDQGYAHAFDIWGRGTTVTVSSNLVPMVATVHHAANLVPMVATV

SEQ ID NO: 206 - protein, 531 aa, Artificial Sequence
  PD-L1 Targeting Molecule
MKEFTLDFSTAKTYVDSLNVIRSAIGTPLQTISSGGTSLLMIDSGIGDNLFAVDILGFDFTLGRFNNLRLIVERNNLYVTGFVNRTNNVFYRFADFSHVTFPGTTAVTLSADSSYTTLQRVAGISRTGMQINRHSLTTSYLDLMSHSGTSLTQSVARAMLRFVTVTAEALRFRQIQRGFRTTLDDLSGASYVMTAEDVDLTLNWGRLSSVLPDYHGQDSVRVGRISFGSINAILGSVALILNSHHHASAVAASPSTPPTPSPSTPPASDIQMTQSPSSLSASVGDRVTITCTGTSSDVGSYNRVSWYQQPPGTAPKLMIYEVSNRPSGVSNRFSGSKSGNTASLTISGLQAEDEADYYCSSHTTSGTYVFGTGTKLTVLGGGGSEVQLVQSGAEVKKPGASVKVSCKASGGTFSSYAISWVRQAPGQGLEWMGGIIPIFGTANYAQKFQGRVTITADESTSTAYMELSSLRSEDTAVYYCARDQGYAHAFDIWGRGTTVTVSSNLVPMVATVHHAANLVPMVATVRRNLVP

SEQ ID NO: 207 - protein, 527 aa, Artificial Sequence; identical to SEQ ID NO: 90
  PD-L1 Targeting Molecule

SEQ ID NO: 208 - protein, 529 aa, Artificial Sequence
  PD-L1 Targeting Molecule
MKEFTLDFSTAKTYVDSLNVIRSAIGTPLQTISSGGTSLLMIDSGIGDNLFAVDILGFDFTLGRFNNLRLIVERNNLYVTGFVNRTNNVFYRFADFSHVTFPGTTAVTLSADSSYTTLQRVAGISRTGMQINRHSLTTSYLDLMSHSGTSLTQSVARAMLRFVTVTAEALRFRQIQRGFRTTLDDLSGASYVMTAEDVDLTLNWGRLSSVLPDYHGQDSVRVGRISFGSINAILGSVALILNSHHHASAVAASPSTPPTPSPSTPPASDIQMTQSPSSLSASVGDRVTITCTGTSSDVGSYNRVSWYQQPPGTAPKLMIYEVSNRPSGVSNRFSGSKSGNTASLTISGLQAEDEADYYCSSHTTSGTYVFGTGTKLTVLGGGGSEVQLVQSGAEVKKPGASVKVSCKASGGTFSSYAISWVRQAPGQGLEWMGGIIPIFGTANYAQKFQGRVTITADESTSTAYMELSSLRSEDTAVYYCARDQGYAHAFDIWGRGTTVTVSSHHAANLVPMVATVHHAANLVPMVATV

SEQ ID NO: 209 - protein, 535 aa, Artificial Sequence
  PD-L1 Targeting Molecule
MKEFTLDFSTAKTYVDSLNVIRSAIGTPLQTISSGGTSLLMIDSGIGDNLFAVDILGFDFTLGRFNNLRLIVERNNLYVTGFVNRTNNVFYRFADFSHVTFPGTTAVTLSADSSYTTLQRVAGISRTGMQINRHSLTTSYLDLMSHSGTSLTQSVARAMLRFVTVTAEALRFRQIQRGFRTTLDDLSGASYVMTAEDVDLTLNWGRLSSVLPDYHGQDSVRVGRISFGSINAILGSVALILNSHHHASAVAASPSTPPTPSPSTPPASDIQMTQSPSSLSASVGDRVTITCTGTSSDVGSYNRVSWYQQPPGTAPKLMIYEVSNRPSGVSNRFSGSKSGNTASLTISGLQAEDEADYYCSSHTTSGTYVFGTGTKLTVLGGGGSEVQLVQSGAEVKKPGASVKVSCKASGGTFSSYAISWVRQAPGQGLEWMGGIIPIFGTANYAQKFQGRVTITADESTSTAYMELSSLRSEDTAVYYCARDQGYAHAFDIWGRGTTVTVSSHHAANLVPMVATVHHAANLVPMVATVRRNLVP

SEQ ID NO: 210 - protein, 516 aa, Artificial Sequence
  PD-L1 Targeting Molecule
MKEFTLDFSTAKTYVDSLNVIRSAIGTPLQTISSGGTSLLMIDSGIGDNLFAVDILGFDFTLGRFNNLRLIVERNNLYVTGFVNRTNNVFYRFADFSHVTFPGTTAVTLSADSSYTTLQRVAGISRTGMQINRHSLTTSYLDLMSHSGTSLTQSVARAMLRFVTVTAEALRFRQIQRGFRTTLDDLSGASYVMTAEDVDLTLNWGRLSSVLPDYHGQDSVRVGRISFGSINAILGSVALILNSHHHASAVAASPSTPPTPSPSTPPASDIQMTQSPSSLSASVGDRVTITCTGTSSDVGSYNRVSWYQQPPGTAPKLMIYEVSNRPSGVSNRFSGSKSGNTASLTISGLQAEDEADYYCSSHTTSGTYVFGTGTKLTVLGGGGSEVQLVQSGAEVKKPGASVKVSCKASGGTFSSYAISWVRQAPGQGLEWMGGIIPIFGTANYAQKFQGRVTITADESTSTAYMELSSLRSEDTAVYYCARDQGYAHAFDIWGRGTTVTVSSNLVPMVATVKDEL

SEQ ID NO: 211 - protein, 520 aa, Artificial Sequence
  PD-L1 Targeting Molecule
MKEFTLDFSTAKTYVDSLNVIRSAIGTPLQTISSGGTSLLMIDSGIGDNLFAVDILGFDFTLGRFNNLRLIVERNNLYVTGFVNRTNNVFYRFADFSHVTFPGTTAVTLSADSSYTTLQRVAGISRTGMQINRHSLTTSYLDLMSHSGTSLTQSVARAMLRFVTVTAEALRFRQIQRGFRTTLDDLSGASYVMTAEDVDLTLNWGRLSSVLPDYHGQDSVRVGRISFGSINAILGSVALILNSHHHASAVAASPSTPPTPSPSTPPASDIQMTQSPSSLSASVGDRVTITCTGTSSDVGSYNRVSWYQQPPGTAPKLMIYEVSNRPSGVSNRFSGSKSGNTASLTISGLQAEDEADYYCSSHTTSGTYVFGTGTKLTVLGGGGSEVQLVQSGAEVKKPGASVKVSCKASGGTFSSYAISWVRQAPGQGLEWMGGIIPIFGTANYAQKFQGRVTITADESTSTAYMELSSLRSEDTAVYYCARDQGYAHAFDIWGRGTTVTVSSHHAANLVPMVATVKDEL

SEQ ID NO: 212 - protein, 527 aa, Artificial Sequence
  PD-L1 Targeting Molecule
MKEFTLDFSTAKTYVDSLNVIRSAIGTPLQTISSGGTSLLMIDSGIGDNLFAVDILGFDFTLGRFNNLRLIVERNNLYVTGFVNRTNNVFYRFADFSHVTFPGTTAVTLSADSSYTTLQRVAGISRTGMQINRHSLTTSYLDLMSHSGTSLTQSVARAMLRFVTVTAEALRFRQIQRGFRTTLDDLSGASYVMTAEDVDLTLNWGRLSSVLPDYHGQDSVRVGRISFGSINAILGSVALILNSHHHASAVAASPSTPPTPSPSTPPASDIQMTQSPSSLSASVGDRVTITCTGTSSDVGSYNRVSWYQQPPGTAPKLMIYEVSNRPSGVSNRFSGSKSGNTASLTISGLQAEDEADYYCSSHTTSGTYVFGTGTKLTVLGGGGSEVQLVQSGAEVKKPGASVKVSCKASGGTFSSYAISWVRQAPGQGLEWMGGIIPIFGTANYAQKFQGRVTITADESTSTAYMELSSLRSEDTAVYYCARDQGYAHAFDIWGRGTTVTVSSNLVPMVATVRRNLVPMVATVKDEL

SEQ ID NO: 213 - protein, 522 aa, Artificial Sequence
  PD-L1 Targeting Molecule
MKEFTLDFSTAKTYVDSLNVIRSAIGTPLQTISSGGTSLLMIDSGIGDNLFAVDILGFDFTLGRFNNLRLIVERNNLYVTGFVNRTNNVFYRFADFSHVTFPGTTAVTLSADSSYTTLQRVAGISRTGMQINRHSLTTSYLDLMSHSGTSLTQSVARAMLRFVTVTAEALRFRQIQRGFRTTLDDLSGASYVMTAEDVDLTLNWGRLSSVLPDYHGQDSVRVGRISFGSINAILGSVALILNSHHHASAVAASPSTPPTPSPSTPPASDIQMTQSPSSLSASVGDRVTITCTGTSSDVGSYNRVSWYQQPPGTAPKLMIYEVSNRPSGVSNRFSGSKSGNTASLTISGLQAEDEADYYCSSHTTSGTYVFGTGTKLTVLGGGGSEVQLVQSGAEVKKPGASVKVSCKASGGTFSSYAISWVRQAPGQGLEWMGGIIPIFGTANYAQKFQGRVTITADESTSTAYMELSSLRSEDTAVYYCARDQGYAHAFDIWGRGTTVTVSSHHAANLVPMVATVRRNLVP

SEQ ID NO: 214 - protein, 516 aa, Artificial Sequence
  PD-L1 Targeting Molecule
MKEFTLDFSTAKTYVDSLNVIRSAIGTPLQTISSGGTSLLMIDSGCGDNLFAVDILGFDFTLGRFNNLRLIVERNNLYVTGFVNRTNNVFYRFADFSHVTFPGTTAVTLSADSSYTTLQRVAGISRTGMQINRHSLTTSYLDLMSHSGTSLTQSVARAMLRFVTVTAEALRFRQIQRGFRTTLDDLSGASYVMTAEDVDLTLNWGRLSSVLPDYHGQDSVRVGRISFGSINAILGSVALILNSHHHASAVAASPSTPPTPSPSTPPASDIQMTQSPSSLSASVGDRVTITCTGTSSDVGSYNRVSWYQQPPGTAPKLMIYEVSNRPSGVSNRFSGSKSGNTASLTISGLQAEDEADYYCSSHTTSGTYVFGTGTKLTVLGGGGSEVQLVQSGAEVKKPGASVKVSCKASGGTFSSYAISWVRQAPGQGLEWMGGIIPIFGTANYAQKFQGRVTITADESTSTAYMELSSLRSEDTAVYYCARDQGYAHAFDIWGRGTTVTVSSHHAANLVPMVATV

SEQ ID NO: 215 - protein, 518 aa, Artificial Sequence
  PD-L1 Targeting Molecule
MKEFTLDFSTAKTYVDSLNVIRSAIGTPLQTISSGGTSLLMIDSGCGDNLFAVDILGFDFTLGRFNNLRLIVERNNLYVTGFVNRTNNVFYRFADFSHVTFPGTTAVTLSADSSYTTLQRVAGISRTGMQINRHSLTTSYLDLMSHSGTSLTQSVARAMLRFVTVTAEALRFRQIQRGFRTTLDDLSGASYVMTAEDVDLTLNWGRLSSVLPDYHGQDSVRVGRISFGSINAILGSVALILNSHHHASAVAASPSTPPTPSPSTPPASDIQMTQSPSSLSASVGDRVTITCTGTSSDVGSYNRVSWYQQPPGTAPKLMIYEVSNRPSGVSNRFSGSKSGNTASLTISGLQAEDEADYYCSSHTTSGTYVFGTGTKLTVLGGGGSEVQLVQSGAEVKKPGASVKVSCKASGGTFSSYAISWVRQAPGQGLEWMGGIIPIFGTANYAQKFQGRVTITADESTSTAYMELSSLRSEDTAVYYCARDQGYAHAFDIWGRGTTVTVSSNLVPMVATVRRNLVP

SEQ ID NO: 216 - protein, 523 aa, Artificial Sequence
  PD-L1 Targeting Molecule
MKEFTLDFSTAKTYVDSLNVIRSAIGTPLQTISSGGTSLLMIDSGCGDNLFAVDILGFDFTLGRFNNLRLIVERNNLYVTGFVNRTNNVFYRFADFSHVTFPGTTAVTLSADSSYTTLQRVAGISRTGMQINRHSLTTSYLDLMSHSGTSLTQSVARAMLRFVTVTAEALRFRQIQRGFRTTLDDLSGASYVMTAEDVDLTLNWGRLSSVLPDYHGQDSVRVGRISFGSINAILGSVALILNSHHHASAVAASPSTPPTPSPSTPPASDIQMTQSPSSLSASVGDRVTITCTGTSSDVGSYNRVSWYQQPPGTAPKLMIYEVSNRPSGVSNRFSGSKSGNTASLTISGLQAEDEADYYCSSHTTSGTYVFGTGTKLTVLGGGGSEVQLVQSGAEVKKPGASVKVSCKASGGTFSSYAISWVRQAPGQGLEWMGGIIPIFGTANYAQKFQGRVTITADESTSTAYMELSSLRSEDTAVYYCARDQGYAHAFDIWGRGTTVTVSSNLVPMVATVRRNLVPMVATV

SEQ ID NO: 217 - protein, 529 aa, Artificial Sequence
  PD-L1 Targeting Molecule
MKEFTLDFSTAKTYVDSLNVIRSAIGTPLQTISSGGTSLLMIDSGCGDNLFAVDILGFDFTLGRFNNLRLIVERNNLYVTGFVNRTNNVFYRFADFSHVTFPGTTAVTLSADSSYTTLQRVAGISRTGMQINRHSLTTSYLDLMSHSGTSLTQSVARAMLRFVTVTAEALRFRQIQRGFRTTLDDLSGASYVMTAEDVDLTLNWGRLSSVLPDYHGQDSVRVGRISFGSINAILGSVALILNSHHHASAVAASPSTPPTPSPSTPPASDIQMTQSPSSLSASVGDRVTITCTGTSSDVGSYNRVSWYQQPPGTAPKLMIYEVSNRPSGVSNRFSGSKSGNTASLTISGLQAEDEADYYCSSHTTSGTYVFGTGTKLTVLGGGGSEVQLVQSGAEVKKPGASVKVSCKASGGTFSSYAISWVRQAPGQGLEWMGGIIPIFGTANYAQKFQGRVTITADESTSTAYMELSSLRSEDTAVYYCARDQGYAHAFDIWGRGTTVTVSSNLVPMVATVRRNLVPMVATVRRNLVP

SEQ ID NO: 218 - protein, 525 aa, Artificial Sequence
  PD-L1 Targeting Molecule
MKEFTLDFSTAKTYVDSLNVIRSAIGTPLQTISSGGTSLLMIDSGCGDNLFAVDILGFDFTLGRFNNLRLIVERNNLYVTGFVNRTNNVFYRFADFSHVTFPGTTAVTLSADSSYTTLQRVAGISRTGMQINRHSLTTSYLDLMSHSGTSLTQSVARAMLRFVTVTAEALRFRQIQRGFRTTLDDLSGASYVMTAEDVDLTLNWGRLSSVLPDYHGQDSVRVGRISFGSINAILGSVALILNSHHHASAVAASPSTPPTPSPSTPPASDIQMTQSPSSLSASVGDRVTITCTGTSSDVGSYNRVSWYQQPPGTAPKLMIYEVSNRPSGVSNRFSGSKSGNTASLTISGLQAEDEADYYCSSHTTSGTYVFGTGTKLTVLGGGGSEVQLVQSGAEVKKPGASVKVSCKASGGTFSSYAISWVRQAPGQGLEWMGGIIPIFGTANYAQKFQGRVTITADESTSTAYMELSSLRSEDTAVYYCARDQGYAHAFDIWGRGTTVTVSSNLVPMVATVHHAANLVPMVATV

SEQ ID NO: 219 - protein, 531 aa, Artificial Sequence
  PD-L1 Targeting Molecule
MKEFTLDFSTAKTYVDSLNVIRSAIGTPLQTISSGGTSLLMIDSGCGDNLFAVDILGFDFTLGRFNNLRLIVERNNLYVTGFVNRTNNVFYRFADFSHVTFPGTTAVTLSADSSYTTLQRVAGISRTGMQINRHSLTTSYLDLMSHSGTSLTQSVARAMLRFVTVTAEALRFRQIQRGFRTTLDDLSGASYVMTAEDVDLTLNWGRLSSVLPDYHGQDSVRVGRISFGSINAILGSVALILNSHHHASAVAASPSTPPTPSPSTPPASDIQMTQSPSSLSASVGDRVTITCTGTSSDVGSYNRVSWYQQPPGTAPKLMIYEVSNRPSGVSNRFSGSKSGNTASLTISGLQAEDEADYYCSSHTTSGTYVFGTGTKLTVLGGGGSEVQLVQSGAEVKKPGASVKVSCKASGGTFSSYAISWVRQAPGQGLEWMGGIIPIFGTANYAQKFQGRVTITADESTSTAYMELSSLRSEDTAVYYCARDQGYAHAFDIWGRGTTVTVSSNLVPMVATVHHAANLVPMVATVRRNLVP

SEQ ID NO: 220 - protein, 527 aa, Artificial Sequence
  PD-L1 Targeting Molecule
MKEFTLDFSTAKTYVDSLNVIRSAIGTPLQTISSGGTSLLMIDSGCGDNLFAVDILGFDFTLGRFNNLRLIVERNNLYVTGFVNRTNNVFYRFADFSHVTFPGTTAVTLSADSSYTTLQRVAGISRTGMQINRHSLTTSYLDLMSHSGTSLTQSVARAMLRFVTVTAEALRFRQIQRGFRTTLDDLSGASYVMTAEDVDLTLNWGRLSSVLPDYHGQDSVRVGRISFGSINAILGSVALILNSHHHASAVAASPSTPPTPSPSTPPASDIQMTQSPSSLSASVGDRVTITCTGTSSDVGSYNRVSWYQQPPGTAPKLMIYEVSNRPSGVSNRFSGSKSGNTASLTISGLQAEDEADYYCSSHTTSGTYVFGTGTKLTVLGGGGSEVQLVQSGAEVKKPGASVKVSCKASGGTFSSYAISWVRQAPGQGLEWMGGIIPIFGTANYAQKFQGRVTITADESTSTAYMELSSLRSEDTAVYYCARDQGYAHAFDIWGRGTTVTVSSHHAANLVPMVATVRRNLVPMVATV

SEQ ID NO: 221 - protein, 533 aa, Artificial Sequence; identical to SEQ ID NO: 166
  PD-L1 Targeting Molecule

SEQ ID NO: 222 - protein, 529 aa, Artificial Sequence
  PD-L1 Targeting Molecule
MKEFTLDFSTAKTYVDSLNVIRSAIGTPLQTISSGGTSLLMIDSGCGDNLFAVDILGFDFTLGRFNNLRLIVERNNLYVTGFVNRTNNVFYRFADFSHVTFPGTTAVTLSADSSYTTLQRVAGISRTGMQINRHSLTTSYLDLMSHSGTSLTQSVARAMLRFVTVTAEALRFRQIQRGFRTTLDDLSGASYVMTAEDVDLTLNWGRLSSVLPDYHGQDSVRVGRISFGSINAILGSVALILNSHHHASAVAASPSTPPTPSPSTPPASDIQMTQSPSSLSASVGDRVTITCTGTSSDVGSYNRVSWYQQPPGTAPKLMIYEVSNRPSGVSNRFSGSKSGNTASLTISGLQAEDEADYYCSSHTTSGTYVFGTGTKLTVLGGGGSEVQLVQSGAEVKKPGASVKVSCKASGGTFSSYAISWVRQAPGQGLEWMGGIIPIFGTANYAQKFQGRVTITADESTSTAYMELSSLRSEDTAVYYCARDQGYAHAFDIWGRGTTVTVSSHHAANLVPMVATVHHAANLVPMVATV

SEQ ID NO: 223 - protein, 535 aa, Artificial Sequence
  PD-L1 Targeting Molecule
MKEFTLDFSTAKTYVDSLNVIRSAIGTPLQTISSGGTSLLMIDSGCGDNLFAVDILGFDFTLGRFNNLRLIVERNNLYVTGFVNRTNNVFYRFADFSHVTFPGTTAVTLSADSSYTTLQRVAGISRTGMQINRHSLTTSYLDLMSHSGTSLTQSVARAMLRFVTVTAEALRFRQIQRGFRTTLDDLSGASYVMTAEDVDLTLNWGRLSSVLPDYHGQDSVRVGRISFGSINAILGSVALILNSHHHASAVAASPSTPPTPSPSTPPASDIQMTQSPSSLSASVGDRVTITCTGTSSDVGSYNRVSWYQQPPGTAPKLMIYEVSNRPSGVSNRFSGSKSGNTASLTISGLQAEDEADYYCSSHTTSGTYVFGTGTKLTVLGGGGSEVQLVQSGAEVKKPGASVKVSCKASGGTFSSYAISWVRQAPGQGLEWMGGIIPIFGTANYAQKFQGRVTITADESTSTAYMELSSLRSEDTAVYYCARDQGYAHAFDIWGRGTTVTVSSHHAANLVPMVATVHHAANLVPMVATVRRNLVP

SEQ ID NO: 224 - protein, 522 aa, Artificial Sequence
  PD-L1 Targeting Molecule
MKEFTLDFSTAKTYVDSLNVIRSAIGTPLQTISSGGTSLLMIDSGCGDNLFAVDILGFDFTLGRFNNLRLIVERNNLYVTGFVNRTNNVFYRFADFSHVTFPGTTAVTLSADSSYTTLQRVAGISRTGMQINRHSLTTSYLDLMSHSGTSLTQSVARAMLRFVTVTAEALRFRQIQRGFRTTLDDLSGASYVMTAEDVDLTLNWGRLSSVLPDYHGQDSVRVGRISFGSINAILGSVALILNSHHHASAVAASPSTPPTPSPSTPPASDIQMTQSPSSLSASVGDRVTITCTGTSSDVGSYNRVSWYQQPPGTAPKLMIYEVSNRPSGVSNRFSGSKSGNTASLTISGLQAEDEADYYCSSHTTSGTYVFGTGTKLTVLGGGGSEVQLVQSGAEVKKPGASVKVSCKASGGTFSSYAISWVRQAPGQGLEWMGGIIPIFGTANYAQKFQGRVTITADESTSTAYMELSSLRSEDTAVYYCARDQGYAHAFDIWGRGTTVTVSSHHAANLVPMVATVRRNLVP

SEQ ID NO: 225 - protein, 500 aa, Artificial Sequence
  PD-L1 Targeting Molecule
MKEFTLDFSTAKTYVDSLNVIRSAIGTPLQTISSGGTSLLMIDSGIGDNLFAVDILGFDFTLGRFNNLRLIVERNNLYVTGFVNRTNNVFYRFADFSHVTFPGTTAVTLSADSSYTTLQRVAGISRTGMQINRHSLTTSYLDLMSHSGTSLTQSVARAMLRFVTVTAEALRFRQIQRGFRTTLDDLSGASYVMTAEDVDLTLNWGRLSSVLPDYHGQDSVRVGRISFGSINAILGSVALISPSTPPTPSPSTPPASDIQMTQSPSSLSASVGDRVTITCTGTSSDVGSYNRVSWYQQPPGTAPKLMIYEVSNRPSGVSNRFSGSKSGNTASLTISGLQAEDEADYYCSSHTTSGTYVFGTGTKLTVLGGGGSEVQLVQSGAEVKKPGASVKVSCKASGGTFSSYAISWVRQAPGQGLEWMGGIIPIFGTANYAQKFQGRVTITADESTSTAYMELSSLRSEDTAVYYCARDQGYAHAFDIWGRGTTVTVSSNLVPMVATV

SEQ ID NO: 226 - protein, 491 aa, Artificial Sequence
  PD-L1 Targeting Molecule
MKEFTLDFSTAKTYVDSLNVIRSAIGTPLQTISSGGTSLLMIDSGIGDNLFAVDILGFDFTLGRFNNLRLIVERNNLYVTGFVNRTNNVFYRFADFSHVTFPGTTAVTLSADSSYTTLQRVAGISRTGMQINRHSLTTSYLDLMSHSGTSLTQSVARAMLRFVTVTAEALRFRQIQRGFRTTLDDLSGASYVMTAEDVDLTLNWGRLSSVLPDYHGQDSVRVGRISFGSINAILGSVALISPSTPPTPSPSTPPASDIQMTQSPSSLSASVGDRVTITCTGTSSDVGSYNRVSWYQQPPGTAPKLMIYEVSNRPSGVSNRFSGSKSGNTASLTISGLQAEDEADYYCSSHTTSGTYVFGTGTKLTVLGGGGSEVQLVQSGAEVKKPGASVKVSCKASGGTFSSYAISWVRQAPGQGLEWMGGIIPIFGTANYAQKFQGRVTITADESTSTAYMELSSLRSEDTAVYYCARDQGYAHAFDIWGRGTTVTVSS

SEQ ID NO: 227 - protein, 508 aa, Artificial Sequence
  PD-L1 Targeting Molecule
MKEFTLDFSTAKTYVDSLNVIRSAIGTPLQTISSGGTSLLMIDSGIGDNLFAVDILGFDFTLGRFNNLRLIVERNNLYVTGFVNRTNNVFYRFADFSHVTFPGTTAVTLSADSSYTTLQRVAGISRTGMQINRHSLTTSYLDLMSHSGTSLTQSVARAMLRFVTVTAEALRFRQIQRGFRTTLDDLSGASYVMTAEDVDLTLNWGRLSSVLPDYHGQDSVRVGRISFGSINAILGSVALISPSTPPTPSPSTPPASDIQMTQSPSSLSASVGDRVTITCTGTSSDVGSYNRVSWYQQPPGTAPKLMIYEVSNRPSGVSNRFSGSKSGNTASLTISGLQAEDEADYYCSSHTTSGTYVFGTGTKLTVLGGGGSEVQLVQSGAEVKKPGASVKVSCKASGGTFSSYAISWVRQAPGQGLEWMGGIIPIFGTANYAQKFQGRVTITADESTSTAYMELSSLRSEDTAVYYCARDQGYAHAFDIWGRGTTVTVSSHHHHHHAANLVPMVATV

SEQ ID NO: 228 - protein, 519 aa, Artificial Sequence
  PD-L1 Targeting Molecule
MKEFTLDFSTAKTYVDSLNVIRSAIGTPLQTISSGGTSLLMIDSGIGDNLFAVDILGFDFTLGRFNNLRLIVERNNLYVTGFVNRTNNVFYRFADFSHVTFPGTTAVTLSADSSYTTLQRVAGISRTGMQINRHSLTTSYLDLMSHSGTSLTQSVARAMLRFVTVTAEALRFRQIQRGFRTTLDDLSGASYVMTAEDVDLTLNWGRLSSVLPDYHGQDSVRVGRISFGSINAILGSVALILNSHHHASAVAASPSTPPTPSPSTPPASDIQMTQSPSSLSASVGDRVTITCTGTSSDVGSYNRVSWYQQPPGTAPKLMIYEVSNRPSGVSNRFSGSKSGNTASLTISGLQAEDEADYYCSSHTTSGTYVFGTGTKLTVLGGGGSEVQLVQSGAEVKKPGASVKVSCKASGGTFSSYAISWVRQAPGQGLEWMGGIIPIFGTANYAQKFQGRVTITADESTSTAYMELSSLRSEDTAVYYCARDQGYAHAFDIWGRGTTVTVSSHHHHHHAASIINFEKL

SEQ ID NO: 229 - protein, 511 aa, Artificial Sequence
  PD-L1 Targeting Molecule
MKEFTLDFSTAKTYVDSLNVIRSAIGTPLQTISSGGTSLLMIDSGIGDNLFAVDILGFDFTLGRFNNLRLIVERNNLYVTGFVNRTNNVFYRFADFSHVTFPGTTAVTLSADSSYTTLQRVAGISRTGMQINRHSLTTSYLDLMSHSGTSLTQSVARAMLRFVTVTAEALRFRQIQRGFRTTLDDLSGASYVMTAEDVDLTLNWGRLSSVLPDYHGQDSVRVGRISFGSINAILGSVALILNSHHHASAVAASPSTPPTPSPSTPPASDIQMTQSPSSLSASVGDRVTITCTGTSSDVGSYNRVSWYQQPPGTAPKLMIYEVSNRPSGVSNRFSGSKSGNTASLTISGLQAEDEADYYCSSHTTSGTYVFGTGTKLTVLGGGGSEVQLVQSGAEVKKPGASVKVSCKASGGTFSSYAISWVRQAPGQGLEWMGGIIPIFGTANYAQKFQGRVTITADESTSTAYMELSSLRSEDTAVYYCARDQGYAHAFDIWGRGTTVTVSSHHHHHHAA

SEQ ID NO: 230 - protein, 519 aa, Artificial Sequence
  PD-L1 Targeting Molecule
MKEFTLDFSTAKTYVDSLNVIRSAIGTPLQTISSGGTSLLMIDSGIGDNLFAVDILGFDFTLGRFNNLRLIVERNNLYVTGFVNRTNNVFYRFADFSHVTFPGTTAVTLSADSSYTTLQRVAGISRTGMQINRHSLTTSYLDLMSHSGTSLTQSVARAMLRFVTVTADALRFRQIQRGFRTTLDDLSGASYVMTAEDVDLTLNWGRLSSVLPDYHGQDSVRVGRISFGSINAILGSVALILNSHHHASAVAASPSTPPTPSPSTPPASDIQMTQSPSSLSASVGDRVTITCTGTSSDVGSYNRVSWYQQPPGTAPKLMIYEVSNRPSGVSNRFSGSKSGNTASLTISGLQAEDEADYYCSSHTTSGTYVFGTGTKLTVLGGGGSEVQLVQSGAEVKKPGASVKVSCKASGGTFSSYAISWVRQAPGQGLEWMGGIIPIFGTANYAQKFQGRVTITADESTSTAYMELSSLRSEDTAVYYCARDQGYAHAFDIWGRGTTVTVSSHHHHHHAASIINFEKL

SEQ ID NO: 231 - protein, 511 aa, Artificial Sequence
  PD-L1 Targeting Molecule
MKEFTLDFSTAKTYVDSLNVIRSAIGTPLQTISSGGTSLLMIDSGIGDNLFAVDILGFDFTLGRFNNLRLIVERNNLYVTGFVNRTNNVFYRFADFSHVTFPGTTAVTLSADSSYTTLQRVAGISRTGMQINRHSLTTSYLDLMSHSGTSLTQSVARAMLRFVTVTADALRFRQIQRGFRTTLDDLSGASYVMTAEDVDLTLNWGRLSSVLPDYHGQDSVRVGRISFGSINAILGSVALILNSHHHASAVAASPSTPPTPSPSTPPASDIQMTQSPSSLSASVGDRVTITCTGTSSDVGSYNRVSWYQQPPGTAPKLMIYEVSNRPSGVSNRFSGSKSGNTASLTISGLQAEDEADYYCSSHTTSGTYVFGTGTKLTVLGGGGSEVQLVQSGAEVKKPGASVKVSCKASGGTFSSYAISWVRQAPGQGLEWMGGIIPIFGTANYAQKFQGRVTITADESTSTAYMELSSLRSEDTAVYYCARDQGYAHAFDIWGRGTTVTVSSHHHHHHAA

SEQ ID NO: 232 - protein, 526 aa, Artificial Sequence
  PD-L1 Targeting Molecule
MKEFTLDFSTAKTYVDSLNVIRSAIGTPLQTISSGGTSLLMIDSGIGDNLFAVDILGFDFTLGRFNNLRLIVERNNLYVTGFVNRTNNVFYRFADFSHVTFPGTTAVTLSADSSYTTLQRVAGISRTGMQINRHSLTTSYLDLMSHSGTSLTQSVARAMLRFVTVTAEALRFRQIQRGFRTTLDDLSGASYVMTAEDVDLTLNWGRLSSVLPDYHGQDSVRVGRISFGSINAILGSVALILNSHHHASAVAASPSTPPTPSPSTPPASDIQMTQSPSSLSASVGDRVTITCTGTSSDVGSYNRVSWYQQPPGTAPKLMIYEVSNRPSGVSNRFSGSKSGNTASLTISGLQAEDEADYYCSSHTTSGTYVFGTGTKLTVLGGGGSEVQLVQSGAEVKKPGASVKVSCKASGGTFSSYAISWVRQAPGQGLEWMGGIIPIFGTANYAQKFQGRVTITADESTSTAYMELSSLRSEDTAVYYCARDQGYAHAFDIWGRGTTVTVSSHHHHHHAANLVPMVATVRRNLVP

SEQ ID NO: 233 - protein, 529 aa, Artificial Sequence
  PD-L1 Targeting Molecule
MKEFTLDFSTAKTYVDSLNVIRSAIGTPLQTISSGGTSLLMIDSGIGDNLFAVDILGFDFTLGRFNNLRLIVERNNLYVTGFVNRTNNVFYRFADFSHVTFPGTTAVTLSADSSYTTLQRVAGISRTGMQINRHSLTTSYLDLMSHSGTSLTQSVARAMLRFVTVTAEALRFRQIQRGFRTTLDDLSGASYVMTAEDVDLTLNWGRLSSVLPDYHGQDSVRVGRISFGSINAILGSVALILNSHHHASAVAASPSTPPTPSPSTPPASDIQMTQSPSSLSASVGDRVTITCTGTSSDVGSYNRVSWYQQPPGTAPKLMIYEVSNRPSGVSNRFSGSKSGNTASLTISGLQAEDEADYYCSSHTTSGTYVFGTGTKLTVLGGGGSEVQLVQSGAEVKKPGASVKVSCKASGGTFSSYAISWVRQAPGQGLEWMGGIIPIFGTANYAQKFQGRVTITADESTSTAYMELSSLRSEDTAVYYCARDQGYAHAFDIWGRGTTVTVSSHHHHHHAASIINFEKLRRSIINFEKL

SEQ ID NO: 234 - protein, 535 aa, Artificial Sequence
  PD-L1 Targeting Molecule
MKEFTLDFSTAKTYVDSLNVIRSAIGTPLQTISSGGTSLLMIDSGIGDNLFAVDILGFDFTLGRFNNLRLIVERNNLYVTGFVNRTNNVFYRFADFSHVTFPGTTAVTLSADSSYTTLQRVAGISRTGMQINRHSLTTSYLDLMSHSGTSLTQSVARAMLRFVTVTAEALRFRQIQRGFRTTLDDLSGASYVMTAEDVDLTLNWGRLSSVLPDYHGQDSVRVGRISFGSINAILGSVALILNSHHHASAVAASPSTPPTPSPSTPPASDIQMTQSPSSLSASVGDRVTITCTGTSSDVGSYNRVSWYQQPPGTAPKLMIYEVSNRPSGVSNRFSGSKSGNTASLTISGLQAEDEADYYCSSHTTSGTYVFGTGTKLTVLGGGGSEVQLVQSGAEVKKPGASVKVSCKASGGTFSSYAISWVRQAPGQGLEWMGGIIPIFGTANYAQKFQGRVTITADESTSTAYMELSSLRSEDTAVYYCARDQGYAHAFDIWGRGTTVTVSSHHHHHHAASIINFEKLRRSIINFEKLRRNLVP

SEQ ID NO: 235 - protein, 525 aa, Artificial Sequence
  PD-L1 Targeting Molecule
MKEFTLDFSTAKTYVDSLNVIRSAIGTPLQTISSGGTSLLMIDSGIGDNLFAVDILGFDFTLGRFNNLRLIVERNNLYVTGFVNRTNNVFYRFADFSHVTFPGTTAVTLSADSSYTTLQRVAGISRTGMQINRHSLTTSYLDLMSHSGTSLTQSVARAMLRFVTVTAEALRFRQIQRGFRTTLDDLSGASYVMTAEDVDLTLNWGRLSSVLPDYHGQDSVRVGRISFGSINAILGSVALILNSHHHASAVAASPSTPPTPSPSTPPASDIQMTQSPSSLSASVGDRVTITCTGTSSDVGSYNRVSWYQQPPGTAPKLMIYEVSNRPSGVSNRFSGSKSGNTASLTISGLQAEDEADYYCSSHTTSGTYVFGTGTKLTVLGGGGSEVQLVQSGAEVKKPGASVKVSCKASGGTFSSYAISWVRQAPGQGLEWMGGIIPIFGTANYAQKFQGRVTITADESTSTAYMELSSLRSEDTAVYYCARDQGYAHAFDIWGRGTTVTVSSHHAASIINFEKLRRSIINFEKL

SEQ ID NO: 236 - protein, 531 aa, Artificial Sequence
  PD-L1 Targeting Molecule
MKEFTLDFSTAKTYVDSLNVIRSAIGTPLQTISSGGTSLLMIDSGIGDNLFAVDILGFDFTLGRFNNLRLIVERNNLYVTGFVNRTNNVFYRFADFSHVTFPGTTAVTLSADSSYTTLQRVAGISRTGMQINRHSLTTSYLDLMSHSGTSLTQSVARAMLRFVTVTAEALRFRQIQRGFRTTLDDLSGASYVMTAEDVDLTLNWGRLSSVLPDYHGQDSVRVGRISFGSINAILGSVALILNSHHHASAVAASPSTPPTPSPSTPPASDIQMTQSPSSLSASVGDRVTITCTGTSSDVGSYNRVSWYQQPPGTAPKLMIYEVSNRPSGVSNRFSGSKSGNTASLTISGLQAEDEADYYCSSHTTSGTYVFGTGTKLTVLGGGGSEVQLVQSGAEVKKPGASVKVSCKASGGTFSSYAISWVRQAPGQGLEWMGGIIPIFGTANYAQKFQGRVTITADESTSTAYMELSSLRSEDTAVYYCARDQGYAHAFDIWGRGTTVTVSSHHAASIINFEKLRRSIINFEKLRRNLVP

SEQ ID NO: 237 - protein, 517 aa, Artificial Sequence
  PD-L1 Targeting Molecule
MKEFTLDFSTAKTYVDSLNVIRSAIGTPLQTISSGGTSLLMIDSGIGDNLFAVDILGFDFTLGRFNNLRLIVERNNLYVTGFVNRTNNVFYRFADFSHVTFPGTTAVTLSADSSYTTLQRVAGISRTGMQINRHSLTTSYLDLMSHSGTSLTQSVARAMLRFVTVTAEALRFRQIQRGFRTTLDDLSGASYVMTAEDVDLTLNWGRLSSVLPDYHGQDSVRVGRISFGSINAILGSVALILNSHHHASAVAASPSTPPTPSPSTPPASDIQMTQSPSSLSASVGDRVTITCTGTSSDVGSYNRVSWYQQPPGTAPKLMIYEVSNRPSGVSNRFSGSKSGNTASLTISGLQAEDEADYYCSSHTTSGTYVFGTGTKLTVLGGGGSEVQLVQSGAEVKKPGASVKVSCKASGGTFSSYAISWVRQAPGQGLEWMGGIIPIFGTANYAQKFQGRVTITADESTSTAYMELSSLRSEDTAVYYCARDQGYAHAFDIWGRGTTVTVSSHHHHHHAARRNLVP

SEQ ID NO: 238 - protein, 529 aa, Artificial Sequence
  PD-L1 Targeting Molecule
MKEFTLDFSTAKTYVDSLNVIRSAIGTPLQTISSGGTSLLMIDSGIGDNLFAVDILGFDFTLGRFNNLRLIVERNNLYVTGFVNRTNNVFYRFADFSHVTFPGTTAVTLSADSSYTTLQRVAGISRTGMQINRHSLTTSYLDLMSHSGTSLTQSVARAMLRFVTVTADALRFRQIQRGFRTTLDDLSGASYVMTAEDVDLTLNWGRLSSVLPDYHGQDSVRVGRISFGSINAILGSVALILNSHHHASAVAASPSTPPTPSPSTPPASDIQMTQSPSSLSASVGDRVTITCTGTSSDVGSYNRVSWYQQPPGTAPKLMIYEVSNRPSGVSNRFSGSKSGNTASLTISGLQAEDEADYYCSSHTTSGTYVFGTGTKLTVLGGGGSEVQLVQSGAEVKKPGASVKVSCKASGGTFSSYAISWVRQAPGQGLEWMGGIIPIFGTANYAQKFQGRVTITADESTSTAYMELSSLRSEDTAVYYCARDQGYAHAFDIWGRGTTVTVSSHHHHHHAASIINFEKLRRSIINFEKL

SEQ ID NO: 239 - protein, 535 aa, Artificial Sequence
  PD-L1 Targeting Molecule
MKEFTLDFSTAKTYVDSLNVIRSAIGTPLQTISSGGTSLLMIDSGIGDNLFAVDILGFDFTLGRFNNLRLIVERNNLYVTGFVNRTNNVFYRFADFSHVTFPGTTAVTLSADSSYTTLQRVAGISRTGMQINRHSLTTSYLDLMSHSGTSLTQSVARAMLRFVTVTADALRFRQIQRGFRTTLDDLSGASYVMTAEDVDLTLNWGRLSSVLPDYHGQDSVRVGRISFGSINAILGSVALILNSHHHASAVAASPSTPPTPSPSTPPASDIQMTQSPSSLSASVGDRVTITCTGTSSDVGSYNRVSWYQQPPGTAPKLMIYEVSNRPSGVSNRFSGSKSGNTASLTISGLQAEDEADYYCSSHTTSGTYVFGTGTKLTVLGGGGSEVQLVQSGAEVKKPGASVKVSCKASGGTFSSYAISWVRQAPGQGLEWMGGIIPIFGTANYAQKFQGRVTITADESTSTAYMELSSLRSEDTAVYYCARDQGYAHAFDIWGRGTTVTVSSHHHHHHAASIINFEKLRRSIINFEKLRRNLVP

SEQ ID NO: 240 - protein, 525 aa, Artificial Sequence
  PD-L1 Targeting Molecule
MKEFTLDFSTAKTYVDSLNVIRSAIGTPLQTISSGGTSLLMIDSGIGDNLFAVDILGFDFTLGRFNNLRLIVERNNLYVTGFVNRTNNVFYRFADFSHVTFPGTTAVTLSADSSYTTLQRVAGISRTGMQINRHSLTTSYLDLMSHSGTSLTQSVARAMLRFVTVTADALRFRQIQRGFRTTLDDLSGASYVMTAEDVDLTLNWGRLSSVLPDYHGQDSVRVGRISFGSINAILGSVALILNSHHHASAVAASPSTPPTPSPSTPPASDIQMTQSPSSLSASVGDRVTITCTGTSSDVGSYNRVSWYQQPPGTAPKLMIYEVSNRPSGVSNRFSGSKSGNTASLTISGLQAEDEADYYCSSHTTSGTYVFGTGTKLTVLGGGGSEVQLVQSGAEVKKPGASVKVSCKASGGTFSSYAISWVRQAPGQGLEWMGGIIPIFGTANYAQKFQGRVTITADESTSTAYMELSSLRSEDTAVYYCARDQGYAHAFDIWGRGTTVTVSSHHAASIINFEKLRRSIINFEKL

SEQ ID NO: 241 - protein, 531 aa, Artificial Sequence
  PD-L1 Targeting Molecule
MKEFTLDFSTAKTYVDSLNVIRSAIGTPLQTISSGGTSLLMIDSGIGDNLFAVDILGFDFTLGRFNNLRLIVERNNLYVTGFVNRTNNVFYRFADFSHVTFPGTTAVTLSADSSYTTLQRVAGISRTGMQINRHSLTTSYLDLMSHSGTSLTQSVARAMLRFVTVTADALRFRQIQRGFRTTLDDLSGASYVMTAEDVDLTLNWGRLSSVLPDYHGQDSVRVGRISFGSINAILGSVALILNSHHHASAVAASPSTPPTPSPSTPPASDIQMTQSPSSLSASVGDRVTITCTGTSSDVGSYNRVSWYQQPPGTAPKLMIYEVSNRPSGVSNRFSGSKSGNTASLTISGLQAEDEADYYCSSHTTSGTYVFGTGTKLTVLGGGGSEVQLVQSGAEVKKPGASVKVSCKASGGTFSSYAISWVRQAPGQGLEWMGGIIPIFGTANYAQKFQGRVTITADESTSTAYMELSSLRSEDTAVYYCARDQGYAHAFDIWGRGTTVTVSSHHAASIINFEKLRRSIINFEKLRRNLVP

SEQ ID NO: 242 - protein, 517 aa, Artificial Sequence
  PD-L1 Targeting Molecule
MKEFTLDFSTAKTYVDSLNVIRSAIGTPLQTISSGGTSLLMIDSGIGDNLFAVDILGFDFTLGRFNNLRLIVERNNLYVTGFVNRTNNVFYRFADFSHVTFPGTTAVTLSADSSYTTLQRVAGISRTGMQINRHSLTTSYLDLMSHSGTSLTQSVARAMLRFVTVTADALRFRQIQRGFRTTLDDLSGASYVMTAEDVDLTLNWGRLSSVLPDYHGQDSVRVGRISFGSINAILGSVALILNSHHHASAVAASPSTPPTPSPSTPPASDIQMTQSPSSLSASVGDRVTITCTGTSSDVGSYNRVSWYQQPPGTAPKLMIYEVSNRPSGVSNRFSGSKSGNTASLTISGLQAEDEADYYCSSHTTSGTYVFGTGTKLTVLGGGGSEVQLVQSGAEVKKPGASVKVSCKASGGTFSSYAISWVRQAPGQGLEWMGGIIPIFGTANYAQKFQGRVTITADESTSTAYMELSSLRSEDTAVYYCARDQGYAHAFDIWGRGTTVTVSSHHHHHHAARRNLVP

SEQ ID NO: 243 - protein, 525 aa, Artificial Sequence
  PD-L1 Targeting Molecule
MKEFTLDFSTAKTYVDSLNVIRSAIGTPLQTISSGGTSLLMIDSGIGDNLFAVDILGFDFTLGRFNNLRLIVERNNLYVTGFVNRTNNVFYRFADFSHVTFPGTTAVTLSADSSYTTLQRVAGISRTGMQINRHSLTTSYLDLMSHSGTSLTQSVARAMLRFVTVTAEALRFRQIQRGFRTTLDDLSGASYVMTAEDVDLTLNWGRLSSVLPDYHGQDSVRVGRISFGSINAILGSVALILNSHHHASAVAASPSTPPTPSPSTPPASDIQMTQSPSSLSASVGDRVTITCTGTSSDVGSYNRVSWYQQPPGTAPKLMIYEVSNRPSGVSNRFSGSKSGNTASLTISGLQAEDEADYYCSSHTTSGTYVFGTGTKLTVLGGGGSEVQLVQSGAEVKKPGASVKVSCKASGGTFSSYAISWVRQAPGQGLEWMGGIIPIFGTANYAQKFQGRVTITADESTSTAYMELSSLRSEDTAVYYCARDQGYAHAFDIWGRGTTVTVSSHHHHHHAASIINFEKLRRNLVP

SEQ ID NO: 244 - protein, 525 aa, Artificial Sequence
  PD-L1 Targeting Molecule
MKEFTLDFSTAKTYVDSLNVIRSAIGTPLQTISSGGTSLLMIDSGIGDNLFAVDILGFDFTLGRFNNLRLIVERNNLYVTGFVNRTNNVFYRFADFSHVTFPGTTAVTLSADSSYTTLQRVAGISRTGMQINRHSLTTSYLDLMSHSGTSLTQSVARAMLRFVTVTADALRFRQIQRGFRTTLDDLSGASYVMTAEDVDLTLNWGRLSSVLPDYHGQDSVRVGRISFGSINAILGSVALILNSHHHASAVAASPSTPPTPSPSTPPASDIQMTQSPSSLSASVGDRVTITCTGTSSDVGSYNRVSWYQQPPGTAPKLMIYEVSNRPSGVSNRFSGSKSGNTASLTISGLQAEDEADYYCSSHTTSGTYVFGTGTKLTVLGGGGSEVQLVQSGAEVKKPGASVKVSCKASGGTFSSYAISWVRQAPGQGLEWMGGIIPIFGTANYAQKFQGRVTITADESTSTAYMELSSLRSEDTAVYYCARDQGYAHAFDIWGRGTTVTVSSHHHHHHAASIINFEKLRRNLVP

SEQ ID NO: 245 - protein, 520 aa, Artificial Sequence
  PD-L1 Targeting Molecule
MKEFTLDFSTAKTYVDSLNVIRSAIGTPLQTISSGGTSLLMIDSGIGDNLFAVDILGFDFTLGRFNNLRLIVERNNLYVTGFVNRTNNVFYRFADFSHVTFPGTTAVTLSADSSYTTLQRVAGISRTGMQINRHSLTTSYLDLMSHSGTSLTQSVARAMLRFVTVTADALRFRQIQRGFRTTLDDLSGASYVMTAEDVDLTLNWGRLSSVLPDYHGQDSVRVGRISFGSINAILGSVALILNSHHHASAVAASPSTPPTPSPSTPPASDIQMTQSPSSLSASVGDRVTITCTGTSSDVGSYNRVSWYQQPPGTAPKLMIYEVSNRPSGVSNRFSGSKSGNTASLTISGLQAEDEADYYCSSHTTSGTYVFGTGTKLTVLGGGGSEVQLVQSGAEVKKPGASVKVSCKASGGTFSSYAISWVRQAPGQGLEWMGGIIPIFGTANYAQKFQGRVTITADESTSTAYMELSSLRSEDTAVYYCARDQGYAHAFDIWGRGTTVTVSSHHHHHHAANLVPMVATV

SEQ ID NO: 246 - protein, 533 aa, Artificial Sequence
  PD-L1 Targeting Molecule
MKEFTLDFSTAKTYVDSLNVIRSAIGTPLQTISSGGTSLLMIDSGCGDNLFAVDILGFDFTLGRFNNLRLIVERNNLYVTGFVNRTNNVFYRFADFSHVTFPGTTAVTLSADSSYTTLQRVAGISRTGMQINRHSLTTSYLDLMSHSGTSLTQSVARAMLRFVTVTADALRFRQIQRGFRTTLDDLSGASYVMTAEDVDLTLNWGRLSSVLPDYHGQDSVRVGRISFGSINAILGSVALILNSHHHASAVAASPSTPPTPSPSTPPASDIQMTQSPSSLSASVGDRVTITCTGTSSDVGSYNRVSWYQQPPGTAPKLMIYEVSNRPSGVSNRFSGSKSGNTASLTISGLQAEDEADYYCSSHTTSGTYVFGTGTKLTVLGGGGSEVQLVQSGAEVKKPGASVKVSCKASGGTFSSYAISWVRQAPGQGLEWMGGIIPIFGTANYAQKFQGRVTITADESTSTAYMELSSLRSEDTAVYYCARDQGYAHAFDIWGRGTTVTVSSHHAANLVPMVATVRRNLVPMVATVRRNLVP

SEQ ID NO: 247 - protein, 533 aa, Artificial Sequence
  PD-L1 Targeting Molecule
MKEFTLDFSTAKTYVDSLNVIRSAIGTPLQTISSGGTSLLMIDSGIGDNLFAVDILGFDFTLGRFNNLRLIVERNNLYVTGFVNRTNNVFYRFADFSHVTFPGTTAVTLSADSSYTTLQRVAGISRTGMQINRHSLTTSYLDLMSHSGTSLTQSVARAMLRFVTVTADALRFRQIQRGFRTTLDDLSGASYVMTAEDVDLTLNWGRLSSVLPDYHGQDSVRVGRISFGSINAILGSVALILNSHHHASAVAASPSTPPTPSPSTPPASDIQMTQSPSSLSASVGDRVTITCTGTSSDVGSYNRVSWYQQPPGTAPKLMIYEVSNRPSGVSNRFSGSKSGNTASLTISGLQAEDEADYYCSSHTTSGTYVFGTGTKLTVLGGGGSEVQLVQSGAEVKKPGASVKVSCKASGGTFSSYAISWVRQAPGQGLEWMGGIIPIFGTANYAQKFQGRVTITADESTSTAYMELSSLRSEDTAVYYCARDQGYAHAFDIWGRGTTVTVSSHHAANLVPMVATVRRNLVPMVATVRRNLVP

SEQ ID NO: 248 - protein, 533 aa, Artificial Sequence
  PD-L1 Targeting Molecule
MKEFTLDFSTAKTYVDSLNVIRSAIGTPLQTISSGGTSLLMIDSGSGDNLFAVDILGFDFTLGRFNNLRLIVERNNLYVTGFVNRTNNVFYRFADFSHVTFPGTTAVTLSADSSYTTLQRVAGISRTGMQINRHSLTTSYLDLMSHSGTSLTQSVARAMLRFVTVTAEALRFRQIQRGFRTTLDDLSGASYVMTAEDVDLTLNWGRLSSVLPDYHGQDSVRVGRISFGSINAILGSVALILNSHHHASAVAASPSTPPTPSPSTPPASDIQMTQSPSSLSASVGDRVTITCTGTSSDVGSYNRVSWYQQPPGTAPKLMIYEVSNRPSGVSNRFSGSKSGNTASLTISGLQAEDEADYYCSSHTTSGTYVFGTGTKLTVLGGGGSEVQLVQSGAEVKKPGASVKVSCKASGGTFSSYAISWVRQAPGQGLEWMGGIIPIFGTANYAQKFQGRVTITADESTSTAYMELSSLRSEDTAVYYCARDQGYAHAFDIWGRGTTVTVSSHHAANLVPMVATVRRNLVPMVATVRRNLVP

SEQ ID NO: 249 - protein, 503 aa, Artificial Sequence
  PD-L1 Targeting Molecule
MKEFTLDFSTAKTYVDSLNVIRSAIGTPLQTISSGGTSLLMIDSGIGDNLFAVDILGFDFTLGRFNNLRLIVERNNLYVTGFVNRTNNVFYRFADFSHVTFPGTTAVTLSADSSYTTLQRVAGISRTGMQINRHSLTTSYLDLMSHSGTSLTQSVARAMLRFVTVTAEALRFRQIQRGFRTTLDDLSGASYVMTAEDVDLTLNWGRLSSVLPDYHGQDSVRVGRISFGSINAILGSVALILNSHHHASRVARSPSTPPTPSPSTPPASDIQMTQSPSSLSASVGDRVTITCTGTSSDVGSYNRVSWYQQPPGTAPKLMIYEVSNRPSGVSNRFSGSKSGNTASLTISGLQAEDEADYYCSSHTTSGTYVFGTGTKLTVLGGGGSEVQLVQSGAEVKKPGASVKVSCKASGGTFSSYAISWVRQAPGQGLEWMGGIIPIFGTANYAQKFQGRVTITADESTSTAYMELSSLRSEDTAVYYCARDQGYAHAFDIWGRGTTVTVSS

SEQ ID NO: 250 - protein, 533 aa, Artificial Sequence
  PD-L1 Targeting Molecule
MKEFTLDFSTAKTYVDSLNVIRSAIGTPLQTISSGGTSLLMIDSGIGDNLFAVDILGFDFTLGRFNNLRLIVERNNLYVTGFVNRTNNVFYRFADFSHVTFPGTTAVTLSADSSYTTLQRVAGISRTGMQINRHSLTTSYLDLMSHSGTSLTQSVARAMLRFVTVTAEALRFRQIQRGFRTTLDDLSGASYVMTAEDVDLTLNWGRLSSVLPDYHGQDSVRVGRISFGSINAILGSVALILNSHHHASRVARSPSTPPTPSPSTPPASDIQMTQSPSSLSASVGDRVTITCTGTSSDVGSYNRVSWYQQPPGTAPKLMIYEVSNRPSGVSNRFSGSKSGNTASLTISGLQAEDEADYYCSSHTTSGTYVFGTGTKLTVLGGGGSEVQLVQSGAEVKKPGASVKVSCKASGGTFSSYAISWVRQAPGQGLEWMGGIIPIFGTANYAQKFQGRVTITADESTSTAYMELSSLRSEDTAVYYCARDQGYAHAFDIWGRGTTVTVSSHHAANLVPMVATVRRNLVPMVATVRRNLVP

SEQ ID NO: 251 - protein, 531 aa, Artificial Sequence
  PD-L1 Targeting Molecule
MKEFTLDFSTAKTYVDSLNVIRSAIGTPLQTISSGGTSLLMIDSGCGDNLFAVDILGFDFTLGRFNNLRLIVERNNLYVTGFVNRTNNVFYRFADFSHVTFPGTTAVTLSADSSYTTLQRVAGISRTGMQINRHSLTTSYLDLMSHSGTSLTQSVARAMLRFVTVTAEALRFRQIQRGFRTTLDDLSGASYVMTAEDVDLTLNWGRLSSVLPDYHGQDSVRVGRISFGSINAILGSVALILNSHHHASAVAASPSTPPTPSPSTPPASDIQMTQSPSSLSASVGDRVTITCTGTSSDVGSYNRVSWYQQPPGTAPKLMIYEVSNRPSGVSNRFSGSKSGNTASLTISGLQAEDEADYYCSSHTTSGTYVFGTGTKLTVLGGGGSEVQLVQSGAEVKKPGASVKVSCKASGGTFSSYAISWVRQAPGQGLEWMGGIIPIFGTANYAQKFQGRVTITADESTSTAYMELSSLRSEDTAVYYCARDQGYAHAFDIWGRGTTVTVSSHHAASIINFEKLRRSIINFEKLRRNLVP

SEQ ID NO: 252 - protein, 531 aa, Artificial Sequence
  PD-L1 Targeting Molecule
MKEFTLDFSTAKTYVDSLNVIRSAIGTPLQTISSGGTSLLMIDSGCGDNLFAVDILGFDFTLGRFNNLRLIVERNNLYVTGFVNRTNNVFYRFADFSHVTFPGTTAVTLSADSSYTTLQRVAGISRTGMQINRHSLTTSYLDLMSHSGTSLTQSVARAMLRFVTVTADALRFRQIQRGFRTTLDDLSGASYVMTAEDVDLTLNWGRLSSVLPDYHGQDSVRVGRISFGSINAILGSVALILNSHHHASAVAASPSTPPTPSPSTPPASDIQMTQSPSSLSASVGDRVTITCTGTSSDVGSYNRVSWYQQPPGTAPKLMIYEVSNRPSGVSNRFSGSKSGNTASLTISGLQAEDEADYYCSSHTTSGTYVFGTGTKLTVLGGGGSEVQLVQSGAEVKKPGASVKVSCKASGGTFSSYAISWVRQAPGQGLEWMGGIIPIFGTANYAQKFQGRVTITADESTSTAYMELSSLRSEDTAVYYCARDQGYAHAFDIWGRGTTVTVSSHHAASIINFEKLRRSIINFEKLRRNLVP

SEQ ID NO: 253 - protein, 529 aa, Artificial Sequence
  PD-L1 Targeting Molecule
MKEFTLDFSTAKTYVDSLNVIRSAIGTPLQTISSGGTSLLMIDSGCGDNLFAVDILGFDFTLGRFNNLRLIVERNNLYVTGFVNRTNNVFYRFADFSHVTFPGTTAVTLSADSSYTTLQRVAGISRTGMQINRHSLTTSYLDLMSHSGTSLTQSVARAMLRFVTVTAEALRFRQIQRGFRTTLDDLSGASYVMTAEDVDLTLNWGRLSSVLPDYHGQDSVRVGRISFGSINAILGSVALILNSHHHASAVAASPSTPPTPSPSTPPASDIQMTQSPSSLSASVGDRVTITCTGTSSDVGSYNRVSWYQQPPGTAPKLMIYEVSNRPSGVSNRFSGSKSGNTASLTISGLQAEDEADYYCSSHTTSGTYVFGTGTKLTVLGGGGSEVQLVQSGAEVKKPGASVKVSCKASGGTFSSYAISWVRQAPGQGLEWMGGIIPIFGTANYAQKFQGRVTITADESTSTAYMELSSLRSEDTAVYYCARDQGYAHAFDIWGRGTTVTVSSHHHHHHAASIINFEKLRRSIINFEKL

SEQ ID NO: 254 - protein, 529 aa, Artificial Sequence
  PD-L1 Targeting Molecule
MKEFTLDFSTAKTYVDSLNVIRSAIGTPLQTISSGGTSLLMIDSGCGDNLFAVDILGFDFTLGRFNNLRLIVERNNLYVTGFVNRTNNVFYRFADFSHVTFPGTTAVTLSADSSYTTLQRVAGISRTGMQINRHSLTTSYLDLMSHSGTSLTQSVARAMLRFVTVTADALRFRQIQRGFRTTLDDLSGASYVMTAEDVDLTLNWGRLSSVLPDYHGQDSVRVGRISFGSINAILGSVALILNSHHHASAVAASPSTPPTPSPSTPPASDIQMTQSPSSLSASVGDRVTITCTGTSSDVGSYNRVSWYQQPPGTAPKLMIYEVSNRPSGVSNRFSGSKSGNTASLTISGLQAEDEADYYCSSHTTSGTYVFGTGTKLTVLGGGGSEVQLVQSGAEVKKPGASVKVSCKASGGTFSSYAISWVRQAPGQGLEWMGGIIPIFGTANYAQKFQGRVTITADESTSTAYMELSSLRSEDTAVYYCARDQGYAHAFDIWGRGTTVTVSSHHHHHHAASIINFEKLRRSIINFEKL

SEQ ID NO: 255 - protein, 521 aa, Artificial Sequence
  PD-L1 Targeting Molecule
MKEFTLDFSTAKTYVDSLNVIRSAIGTPLQTISSGGTSLLMIDSGIGDNLFAVDILGFDFTLGRFNNLRLIVERNNLYVTGFVNRTNNVFYRFADFSHVTFPGTTAVTLSADSSYTTLQRVAGISRTGMQINRHSLTTSYLDLMSHSGTSLTQSVARAMLRFVTVTAEALRFRQIQRGFRTTLDDLSGASYVMTAEDVDLTLNWGRLSSVLPDYHGQDSVRVGRISFGSINAILGSVALISPSTPPTPSPSTPPASDIQMTQSPSSLSASVGDRVTITCTGTSSDVGSYNRVSWYQQPPGTAPKLMIYEVSNRPSGVSNRFSGSKSGNTASLTISGLQAEDEADYYCSSHTTSGTYVFGTGTKLTVLGGGGSEVQLVQSGAEVKKPGASVKVSCKASGGTFSSYAISWVRQAPGQGLEWMGGIIPIFGTANYAQKFQGRVTITADESTSTAYMELSSLRSEDTAVYYCARDQGYAHAFDIWGRGTTVTVSSHHAANLVPMVATVRRNLVPMVATVRRNLVP

SEQ ID NO: 256 - protein, 521 aa, Artificial Sequence
  PD-L1 Targeting Molecule
MKEFTLDFSTAKTYVDSLNVIRSAIGTPLQTISSGGTSLLMIDSGCGDNLFAVDILGFDFTLGRFNNLRLIVERNNLYVTGFVNRTNNVFYRFADFSHVTFPGTTAVTLSADSSYTTLQRVAGISRTGMQINRHSLTTSYLDLMSHSGTSLTQSVARAMLRFVTVTAEALRFRQIQRGFRTTLDDLSGASYVMTAEDVDLTLNWGRLSSVLPDYHGQDSVRVGRISFGSINAILGSVALISPSTPPTPSPSTPPASDIQMTQSPSSLSASVGDRVTITCTGTSSDVGSYNRVSWYQQPPGTAPKLMIYEVSNRPSGVSNRFSGSKSGNTASLTISGLQAEDEADYYCSSHTTSGTYVFGTGTKLTVLGGGGSEVQLVQSGAEVKKPGASVKVSCKASGGTFSSYAISWVRQAPGQGLEWMGGIIPIFGTANYAQKFQGRVTITADESTSTAYMELSSLRSEDTAVYYCARDQGYAHAFDIWGRGTTVTVSSHHAANLVPMVATVRRNLVPMVATVRRNLVP

SEQ ID NO: 257 - protein, 26 aa, Artificial Sequence
  T-cell epitope
NLVPMVATVRRNLVPMVATVRRNLVP

SEQ ID NO: 258 - protein, 33 aa, Artificial Sequence
  T-cell eptiope
NLVPMVATVHHLNLVPMVATVHHANLVPMVATV

SEQ ID NO: 259 - protein, 251 aa, Artificial Sequence
  Shiga toxin subunit effector polypeptide
KEFTLDFSTAKTYVDSLNVIRSAIGTPLQTISSGGTSLLMIDSGCGDNLFAVDILGFDFTLGRFNNLRLIVERNNLYVTGFVNRTNNVFYRFADFSHVTFPGTTAVTLSADSSYTTLQRVAGISRTGMQINRHSLTTSYLDLMSHSGTSLTQSVARAMLRFVTVTAEALRFRQIQRGFRTTLDDLSGASYVMTAEDVDLTLNWGRLSSVLPDYHGQDSVRVGRISFGSINAILGSVALILNSHHHASAVAA

SEQ ID NO: 260 - protein, 8 aa, Artificial Sequence
  spacer
HHHHHHAA

SEQ ID NO: 261 - protein, 239 aa, Artificial Sequence
  Shiga toxin subunit effector polypeptide
KEFTLDFSTAKTYVDSLNVIRSAIGTPLQTISSGGTSLLMIDSGCGDNLFAVDILGFDFTLGRFNNLRLIVERNNLYVTGFVNRTNNVFYRFADFSHVTFPGTTAVTLSADSSYTTLQRVAGISRTGMQINRHSLTTSYLDLMSHSGTSLTQSVARAMLRFVTVTAEALRFRQIQRGFRTTLDDLSGASYVMTAEDVDLTLNWGRLSSVLPDYHGQDSVRVGRISFGSINAILGSVALI

SEQ ID NO: 262 - protein, 240 aa, Artificial Sequence
  Shiga toxin subunit effector polypeptide
MKEFTLDFSTAKTYVDSLNVIRSAIGTPLQTISSGGTSLLMIDSGIGDNLFAVDILGFDFTLGRFNNLRLIVERNNLYVTGFVNRTNNVFYRFADFSHVTFPGTTAVTLSADSSYTTLQRVAGISRTGMQINRHSLTTSYLDLMSHSGTSLTQSVARAMLRFVTVTAEALRFRQIQRGFRTTLDDLSGASYVMTAEDVDLTLNWGRLSSVLPDYHGQDSVRVGRISFGSINAILGSVALI

SEQ ID NO: 263 - protein, 239 aa, Artificial Sequence
  Shiga toxin subunit effector polypeptide
KEFTLDFSTAKTYVDSLNVIRSAIGTPLQTISSGGTSLLMIDSGIGDNLFAVDILGFDFTLGRFNNLRLIVERNNLYVTGFVNRTNNVFYRFADFSHVTFPGTTAVTLSADSSYTTLQRVAGISRTGMQINRHSLTTSYLDLMSHSGTSLTQSVARAMLRFVTVTAEALRFRQIQRGFRTTLDDLSGASYVMTAEDVDLTLNWGRLSSVLPDYHGQDSVRVGRISFGSINAILGSVALI

SEQ ID NO: 264 - protein, 239 aa, Artificial Sequence; identical to SEQ ID NO: 263
  Shiga toxin subunit effector polypeptide

SEQ ID NO: 265 - protein, 239 aa, Artificial Sequence
  Shiga toxin subunit effector polypeptide
KEFTLDFSTAKTYVDSLNVIRSAIGTPLQTISSGGTSLLMIDSGIGDNLFAVDILGFDFTLGRFNNLRLIVERNNLYVTGFVNRTNNVFYRFADFSHVTFPGTTAVTLSADSSYTTLQRVAGISRTGMQINRHSLTTSYLDLMSHSGTSLTQSVARAMLRFVTVTADALRFRQIQRGFRTTLDDLSGASYVMTAEDVDLTLNWGRLSSVLPDYHGQDSVRVGRISFGSINAILGSVALI

SEQ ID NO: 266 - protein, 239 aa, Artificial Sequence; identical to SEQ ID NO: 265
  Shiga toxin subunit effector polypeptide

SEQ ID NO: 267 - protein, 239 aa, Artificial Sequence; identical to SEQ ID NO: 265
  Shiga toxin subunit effector polypeptide

SEQ ID NO: 268 - protein, 239 aa, Artificial Sequence; identical to SEQ ID NO: 265
  Shiga toxin subunit effector polypeptide

SEQ ID NO: 269 - protein, 239 aa, Artificial Sequence; identical to SEQ ID NO: 265
  Shiga toxin subunit effector polypeptide

SEQ ID NO: 270 - protein, 239 aa, Artificial Sequence; identical to SEQ ID NO: 265
  Shiga toxin subunit effector polypeptide

SEQ ID NO: 271 - protein, 239 aa, Artificial Sequence; identical to SEQ ID NO: 265
  Shiga toxin subunit effector polypeptide

SEQ ID NO: 272 - protein, 239 aa, Artificial Sequence; identical to SEQ ID NO: 265
  Shiga toxin subunit effector polypeptide

SEQ ID NO: 273 - protein, 239 aa, Artificial Sequence; identical to SEQ ID NO: 265
  Shiga toxin subunit effector polypeptide

SEQ ID NO: 274 - protein, 239 aa, Artificial Sequence; identical to SEQ ID NO: 265
  Shiga toxin subunit effector polypeptide

SEQ ID NO: 275 - protein, 239 aa, Artificial Sequence
  Shiga toxin subunit effector polypeptide
KEFTLDFSTAKTYVDSLNVIRSAIGTPLQTISSGGTSLLMIDSGCGDNLFAVDILGFDFTLGRFNNLRLIVERNNLYVTGFVNRTNNVFYRFADFSHVTFPGTTAVTLSADSSYTTLQRVAGISRTGMQINRHSLTTSYLDLMSHSGTSLTQSVARAMLRFVTVTADALRFRQIQRGFRTTLDDLSGASYVMTAEDVDLTLNWGRLSSVLPDYHGQDSVRVGRISFGSINAILGSVALI

SEQ ID NO: 276 - protein, 239 aa, Artificial Sequence; identical to SEQ ID NO: 265
  Shiga toxin subunit effector polypeptide

SEQ ID NO: 277 - protein, 239 aa, Artificial Sequence; identical to SEQ ID NO: 275
  Shiga toxin subunit effector polypeptide

SEQ ID NO: 278 - protein, 239 aa, Artificial Sequence; identical to SEQ ID NO: 265
  Shiga toxin subunit effector polypeptide

SEQ ID NO: 279 - protein, 239 aa, Artificial Sequence
  Shiga toxin subunit effector polypeptide
KEFTLDFSTAKTYVDSLNVIRSAIGTPLQTISSGGTSLLMIDSGSGDNLFAVDILGFDFTLGRFNNLRLIVERNNLYVTGFVNRTNNVFYRFADFSHVTFPGTTAVTLSADSSYTTLQRVAGISRTGMQINRHSLTTSYLDLMSHSGTSLTQSVARAMLRFVTVTAEALRFRQIQRGFRTTLDDLSGASYVMTAEDVDLTLNWGRLSSVLPDYHGQDSVRVGRISFGSINAILGSVALI

SEQ ID NO: 280 - protein, 239 aa, Artificial Sequence; identical to SEQ ID NO: 263
  Shiga toxin subunit effector polypeptide

SEQ ID NO: 281 - protein, 239 aa, Artificial Sequence; identical to SEQ ID NO: 263
  Shiga toxin subunit effector polypeptide

SEQ ID NO: 282 - protein, 240 aa, Artificial Sequence
  Shiga toxin subunit effector polypeptide
KEFTLDFSTAKTYVDSLNVIRSAIGTPLQTISSGGTSLLMIDSGCGDNLFAVDILGFDFTLGRFNNLRLIVERNNLYVTGFVNRTNNVFYRFADFSHVTFPGTTAVTLSADSSYTTLQRVAGISRTGMQINRHSLTTSYLDLMSHSGTSLTQSVARAMLRFVTVTADALRFRQIQRGFRTTLDDLSGASYVMTAEDVDLTLNWGRLSSVLPDYHGQDSVRVGRISFGSINAILGSVALIL

SEQ ID NO: 283 - protein, 239 aa, Artificial Sequence; identical to SEQ ID NO: 275
  Shiga toxin subunit effector polypeptide

SEQ ID NO: 284 - protein, 232 aa, Artificial Sequence
  Shiga toxin subunit effector polypeptide
KEFTLDFSTAKTYVDSLNVIRSAIGTPLQTISSGGTSLLMIDSGIGDNLFAVDILGFDFTLGRFNNLRLIVERNNLYVTGFVNRTNNVFYRFADFSHVTFPGTTAVTLSADSSYTTLQRVAGISRTGMQINRHSLTTSYLDLMSHSGTSLTQSVARAMLRFVTVTAEALRFRQIQRGFRTTLDDLSGASYVMTAEDVDLTLNWGRLSSVLPDYHGQDSVRVGRISFGSINAI

SEQ ID NO: 285 - protein, 15 aa, Artificial Sequence
  linker 8
AHHSEDPSSKAPKAP

SEQ ID NO: 286 - protein, 9 aa, Artificial Sequence
  T-cell epitope-peptide C24
VYALPLKML

SEQ ID NO: 287 - protein, 9 aa, Artificial Sequence
  T-cell epitope-peptide C24-2
QYDPVAALF

SEQ ID NO: 288 - protein, 9 aa, Artificial Sequence
  T-cell epitope-peptide E2
CLGGLLTMV

SEQ ID NO: 289 - protein, 16 aa, Artificial Sequence
  linker 16
SPSTPPTPSPSTPPAS

What is claimed is:

1. A PD-L1 binding molecule comprising:
A) a Shiga toxin A subunit effector polypeptide; and
B) a binding region capable of specifically binding an extracellular part of PD-L1, wherein the binding region comprises
(a) a light chain variable region comprising:
(i) a CDR1 comprising the amino acid sequence TGTSSDVGSYNRVS (SEQ ID NO:19),
(ii) a CDR2 comprising the amino acid sequence EVSNRPS (SEQ ID NO:20), and
(iii) a CDR3 comprising the amino acid sequence SSHTTSGTYV (SEQ ID NO:21);
and
(b) a heavy chain variable region comprising:
(i) a CDR1 comprising the amino acid sequence SYAIS (SEQ ID NO:22),
(ii) a CDR2 comprising the amino acid sequence GIIPIFGTANYAQKFQG (SEQ ID NO:23), and
(iii) a CDR3 comprising the amino acid sequence DQGYAHAFDI (SEQ ID NO:24).

2. The PD-L1 binding molecule of claim 1, wherein the Shiga toxin A subunit effector polypeptide comprises a proteinaceous linker that links the light chain variable region and the heavy chain variable region.

3. The PD-L1 binding molecule of claim 2, wherein the linker is about 3 to about 50 amino acids in length.

4. The PD-L1 binding molecule of claim 1, wherein the light chain variable region comprises the sequence of any one of SEQ ID NO: 25 or 27, or a sequence at least 90% identical thereto, and the heavy chain variable region comprises the sequence of SEQ ID NO: 26, or a sequence at least 90% identical thereto.

5. The PD-L1 binding molecule of claim 1, wherein the binding region comprises a sequence of any one of SEQ ID NO: 28-35 or 38-40, or a sequence at least 90% identical thereto.

6. The PD-L1 binding molecule of claim 1, wherein the binding region comprises SEQ ID NO: 38, or a sequence at least 90% identical thereto.

7. The PD-L1 binding molecule of claim 1, wherein the molecule comprises at least one CD8+ T-cell epitope.

8. The PD-L1 binding molecule of claim 7, wherein the at least one CD8+ T-cell epitope is located C-terminal to the binding region.

9. The PD-L1 binding molecule of claim 7, wherein the CD8+ T-cell epitope comprises the sequence of SEQ ID NO: 77.

10. The PD-L1 binding molecule claim 1, wherein the Shiga toxin A subunit effector polypeptide has at least 95% amino acid sequence identity to a wild-type Shiga toxin A Subunit amino acid sequence selected from:
amino acid residues 75 to 251 of any one of SEQ ID NOs: 1-18,
amino acid residues 1 to 241 of any one of SEQ ID NOs: 1-18,
amino acid residues 1 to 251 of any one of SEQ ID NOs: 1-18, and
amino acid residues 1 to 261 of any one of SEQ ID NOs: 1-18.

11. The PD-L1 binding molecule of claim 1, wherein the Shiga toxin A subunit effector polypeptide comprises the sequence of any one of SEQ ID NO: 1-18, 41-69, or 261-284.

12. The PD-L1 binding molecule of claim 1, wherein the Shiga toxin A subunit effector polypeptide comprises the sequence of SEQ ID NO: 41.

13. The PD-L1 binding molecule of claim 1, wherein the Shiga toxin A subunit effector polypeptide comprises a disrupted furin-cleavage site.

14. The PD-L1 binding molecule of claim 1, wherein the Shiga toxin A subunit effector polypeptide and binding region are fused, forming a continuous polypeptide that comprises, from N-terminus to C-terminus, the Shiga toxin A subunit effector polypeptide and the binding region.

15. The PD-L1 binding molecule of claim 1, wherein the molecule comprises the amino acid sequence of any one of SEQ ID NOs: 84-110, 166, or 188-256.

16. The PD-L1 binding molecule of claim 1, wherein the molecule comprises the amino acid sequence of SEQ ID NO: 86 or 87.

17. A pharmaceutical composition comprising the PD-L1 binding molecule of claim 1, and at least one pharmaceutically acceptable excipient or carrier.

18. A polynucleotide encoding the PD-L1 binding molecule of claim 1, or a complement thereof.

19. A method of treating a disease, disorder, or condition involving a PD-L1 expressing cell type, the method comprising the step administering to a patient in need thereof an effective amount of a PD-L1 binding molecule of claim 1.

20. The method of claim 19, wherein the disease, disorder, or condition is a cancer selected from: bone cancer, breast cancer, central/peripheral nervous system cancer, gastrointestinal cancer, germ cell cancer, glandular cancer, head-neck cancer, hematological cancer, kidney-urinary tract cancer, liver cancer, lung/pleura cancer, prostate cancer, sarcoma, skin cancer, and uterine cancer.
